United States Patent Application Publication US 2018/0201979 A1 - sequence listing, part 2

SEQ ID NO: 1 - DNA, 3964912 bp, Acinetobacter baumannii MDR-TJ (residues 1,982,457-3,964,912 of 3,964,912)
agacaccaagtatcgaagcgattttagataaataccgtcaagcagtaaccacaatttctgggcgtgttgttggaacttctactgccgttgtgagccgtacgcaagtcgaaagtggtgaaagcccactaggtgatatgattgccgatgcgcagcaagctgccgctcttcaagcaagtaatcaaggttcggattttacgttaatgaacccgggtggtgtacgtgctgacctactgattaacagcaataaccagattacgtttggtgatatttttgcagttcaacctttcggtaactcgattgtgactttgagcttaaccggtaaacagattagagatgtgcttgaacaacaatggtctggtgcaaatgcaaattcgcctagaattttacagccgtctaaagagttgagttatcaatatgcggcaaatacatctgtttcaccacgagcaagtaacatcatggttgctggttcaccattagttgacactaaagtatatcgcgtgacggtaaatagtttcttggcagatggtggtgacaactttacggtattaaaagaaggccaaaaccgtgtcggtggtggtcaagatatcgatgcgcttgaaagctatgttgctaagaactcaccgttaattattccggctacgactcgtattaaagtcattaaataactcatttaagaatgcataaaggacagtatgatgctgtcctttatttttataacagtttaaaagatttttattcagtataaagattgagttcaacactactaatgtcgactccggtgtttgcaaaaataatatccgtaacctcatgaagtaattctttaactttctcattttcaaagttcaaggcttcagaggttttgagcgaaatgaggttacagctcatcttgtcttttctaagcttataaatacttttactttttcctaaaaacacccttttgatgattttacggttttcaaactcagataaaattcgataaatggtacctaacgtaattttatgttcatttttaatttgcgcatagatacttaccgcgcttaagccttgtgggttctgatttaaaatctcaaaaacttgtaccctcgatttttttatcggtaatccatttaataatgattttgatattgtcgtcatcttactgaaccttaatgtctagaaatataggaattttttaaaattattttgactatatttacctgaaaattatggaaatgatttgatctataaattagaacttactaccctataaataagctccgagctaattattacgttttaaaataactcccatattatccctctctttgctttttacatgtacgcactttgcgaatagatgcaatcttgaactgaaccatatggcgaccctcttcattaatatcactcttcaacattattttatataatggttaacatatgataattattatcatttgtgtttaacggtgtatcatatacacataagttttaatattcaatattaagtaattatctaatacataatgataaccattatattttattgattaaataatgatgaattgcatccatcctctattataagtattcatttcgacccatataaaaagcagatcaatgacctgctctttatatcttaaatacagaaagttaaatgatttttattctagaggtagtgcatcttattcttgtatccatgcttggattacttgttgtgttgtcataacttgagcacatcgtgtactggcatattttaatgccatatcgtgctcttctctactaaagtcagccagcgcatcaccacataaaaatggctgtatgtttagcataaatgcttccgcagcactcattagacaaccaatatgtgcatatacaccacagataatcagttgatcgcgaccagagtctcgcatgagttgttcgagcggagaaaatttaaaaacactatatctccacttagtaagcaccgtatcatttttttgaggtgaaattttcggaaaaatctgtgtgatgcttggctcatcctttaaaccaggcccccaaaagtcggttaataactgccgatattcaggtgactggttgccaggttgtgctgtataaacaacgggaatattagactggcgagcagcatcaattaatgccttagtgttttgaattagttctggaataggttcttgggttagatcatagaaatctaaaaaatattgctgcatatcatgaaccaataaaacagcacgactggtatgcaatggccaatttgttttgtttggagtaaattcgtgcgcttggggcatgctgtaacttgcaatctttggaatactcattggtattttccttttctatctttaaaaatatttgttctttaatttcagtgtattgttgtgctgaagtaagctttaaaccccaagtgtagctcctccatctaccactatttcttgcattgtaatttgggccgctcggtccgaaagtaaaaagctcacggtattggcaatatcatctggttgcgcgagttttcttaatggaattcctgttcggtactggcttaaatcaccatcaattactgcaggtggaggtgcattatctgtccagagttgttgctgcatttgagtgagagtagatccaggtgaaacgatattcagtctgacttgataaggtgcgatttcaagtgccagattgcgacaaaaatgacttagtgcagccttagtggtggcgtacataccaagttgcatacgtggcatacgcgcactatttgaactaatagtgacaatgctaccccgcctttttgcacaaaaatgtttagcaacttgttggctgatcgcgataggcgccatgacattgaccgcaaaaagtgtttcccaatcttccgtttttgcttcaagcatggagcgcataattaatactcctgctgcatttactaaccccgtaatttcgtatttttctaacagctctgaaattaaagtttgtgtttcttgttgatgggtaatgtcttgtgagatgccttgccattgtgaagattgatctgacgtcattgttttactgatatcccattgttcaggatttttttgacagtcaataccaataacatgatacccctgatctagtagttgcttggcgatagccgctcctatccctcttgcagcacctgtgaccacgatggtagagcgcatgtgaatactccaatttatattataaagaaatctataaatataattgcaaataattatcattcttatcaatagcaaatggatataaaagttcaaattatgatctgatacaaatgagttacagcttaaaattacaagctaagacattgttttataattagtttataaaatttaaaggtcaagaatattttgttattaataatcattttcaataagacaggttttgatttattcggctaaaatcagatttatggtttatcaaaactagtaactttttaggattcgatctcccgcaggctcagaatgagttctctataactccgactctcgtaagtttggaaatgcgtataaaaaatgaaaaattataaaatccacattgtttcggtcagttgtttaatctcttgaatatcatgacttacataaatcatcggaattttaatttcctcttttaccttttgaaaaaaaggaataatttcagctttatgattcgcatctaatgctgataaaggttcatcaagcagtaacagcttaggcgaatataataatgctcgacctagtgccacgcgctgcttttccccacctgagagtttgataggcatacgttgtaataaatgccctaactttaataactcaataatgtaatctgcttcaaattgacgttcttgttgggaaagatgctgaaaaccaaataataaattttgcttgactgttttatgcggaaaaagctgagcatcttgaaaaaccaatccaacatgccgtttttgcgtgctgacattaattttttgatttgaatcaaaccacgtttgatcctgtattttaataagcccactacgcggagtgttcagccctgcaatggcatgtaaaatggacgttttacctgacccagaggcaccaaatagcccaataacagaagcatctgactggaaactaggttcaatatgaaactggcccatgtgtagctgaaaacggcattcaatcaacataattttaccgtcctaaccgcttcttttgataacgatgaaaccactgggcaaaccatagcgctaaaaaagctacacttaacgataaaacaataagcctttgaatagcagcttctgtatcgggttgttgcattaagctatacatggctagaggcaaagtccgtgtttcatttgaaatattacccacaaaagtaatggtggccccaaactctcctaaactacggcaaaaacataaaatagcaccaattaaaatgccactgctggcaagaggcaaagtgacatgaaaaaatgcccctaaagatgaggcacctaatgtctttgctgccatttctaaacgctgatcgaccagttcaatcgctagacgaatagattgcaccaataacgggaaacccatcactgccgaagcaagaacggcgcctttccagttaaatgcaaaatcaattccgagcggtgccaaatattgtccaataatgccgcggctcccaaaaacttgtaaaagcaaataaccaggtacaactggcggtaacaccaaaggtaaaaacaccaatgtttcaatgaatgacttaccccaaaactctttacgtgccaaaaaccatcccacacaaattgcaggaataatactgaccacaagacaacttgctgcaaccttacaagaaagttgcagaacgctgagctcttctggggttagagaaaacatcatggcttgactggagccaacacgctaaagccatattttttaaaaacagctttggcttgattgctttgtaaaaattgatagaactttgttgagttcggattctttttaatcaaccctaaaggataaataattggtgaatgtgtattttccggaaatatgccagctaccttcacgtctttgctaatcgcagcatcggttgcatagacaataccgacctgacattcaccacgcgcaacaaagtttaaagcagctcgaacatcttctgtttcaactaactttggctcaatacgactccaccaacctaaattagtaaaagcttgtttggcatatttgcctacaggcacacttttggtatctcctgtacaaatctttcctgtaaacactctattgggatcggtcgttttatctagttttatgtttaatgattgccctttaggggtaattagaaccaaacgattacctaataaatttatacggtcatttgttgcaactaattttttgttttgtagataatccatccactgggtatctgctgaaataaaaatatcagctggtgctccagcttcaatttgtttagctaaggtcgatgaacctgcatatgaagttttaacttctactttattctgtttttcgtaaattttttctaaatcgttaattgcattcgttaagcttgctgctgcataaacagtaactgattcagccttggctggaacattaaagaccaatcctatgctgaggactgaacaggcgaaagccaaattttttatcttcgtatcacttaccattatgtttaccttttttgtgtttttttgcagcgatatatacccaagaatatagcgctacacgaagattatgaaaagcataattcgttaactatagatgactggaatgcagcagtgctttttcggcgtgcacttgatattaagcaaaagctataccaaatcaaaagatttcatcgttatgcaatcttttatcttaaccttttaaataactactcatgatttggtaatcatgctctaaagcttgtcgggcattgttttccatttgacggtaatgctgtaagactttctggcccaaagctgtgatagctgccccaccaccatgtgttccccccgtttgtgtttccactaaagctgtttcaaagcattgattcatggtgtcgactaactgccatgcacggcgatagctcatattcatagattttgcagcttgtgagattgaaccagttctcgcaattgcttcaagtaaatccgccttacccggaccaaatgcaatattttgctctaaaagaattctaatttgtaattttaagttttgttctttcatagacttagttcacaaagtttcatttttatgctgcttaacattataggaaactttaatagcttaaaacacatacaaatttaaatctctactctttcttcaaaagagttcaattaaaaaatcaaaactgcacaaagtggataaagatctggaaaaaacggatagagagcaatgcttaatcgcggttcaatcagttaaaagctgattgattggaggattgagtaaatgacctcatctaatttaaaacaatggaatgattttatagatggatgtatcgacttccgtcctaacgatggcgtgttccgtatcgcacgcgacatgtttaccgagccagaactatttgacttggaaatggaatttatttttgaaaaggtttggatttacgcatgtcacgaaagtgaaattccaaacaatcatgatttcctaaccgttcaaattggccgccaaccgattattgtaagccgtgatggtaaaggcgaactacatgccatggtgaatgcttgtgaacaccgcggtgcgaccttaacacgtgttgctaaaggcaatcaatctacatttacctgcccgtttcatgcttggtgttataaatcagatggccgtttggttaaagtcaaagcgcctagcgaatattgtgaagattttgataaatcaagccgtggtttaaaacaaggccgtattgccagctaccgtggatttgtatttgtaagtcttgatactcaagcaacagattcactagaagactttttgggcgatgcaaaactgttccttgatttaatggttaaccagtcgccaacaggtgaactcgaagtattacaaggtaagtcatcttatacctttgcaggtaactggaagctacaaaatgaaaatggtctagatggttatcatgtaagtaccgttcactataactatgtctctacagttcaacaccgtcagcaagtcaatgcatcaaaaggtgccgaactcgacacgctcgactacagtaaattaggtgcaggtgactcagaaactgatgatggctggtttagttttaaaaatggccatagtgttttattcagtgacatgccaaatccgacagttcgtccaggctacagcacagttatgccatatatggttgaaaaatatggcgaaaaatatgctgaatgggcaatgcatcgtttaagaaatttgaacttgtaccctagcctattttttatggatcaaattagctcacagcttcgtattgttcgccctgtggcatggaataaaactgaagtcattagccaatgtattggtgttaaaggtgaatctactgaagcacgccgtaatcgtattcgccagtttgaagatttctttaacgtatcaggccttggtacaccagacgatttagttgaattccgtgaacagcaaaaaggttttcaggcacgacttgaacgttggagcgatatttcacgtggttgtcagtcttgggaatatggcgcgaccaaaaactcacaagatttaggcattcaacccgttattactggccgtgaatttacccatgaaggactctatgtaaaccagcatggacactggcaacgtctcatgctcgatggcttaaataaaaaagcgctgaaaatgcaggatattacttttgaaaacaatgccgtaatggatgaggtgtaaccatgtcacaagaactacattttgctgtatctcagtttttgtacaaaaaggcagagctttgtgatgcttatgactgggatgcctacctagagctttacgatgaagatagtgaatatcatatcccacagtggattgatgaccataactatgttcaagatccaaatcagggcttgtcttatatttattatgcggaccgtactggactcgaagaccgtgtattccgtattcgtacaggtaaagcagcctctgcaacgccgttaccacgtactttgcacagcataaacaacatccgagttaaaacactggaagatggtcttatcgaagcaaaagttgcatggcaaacgctttataatcgtcaaggtttagaaggctgtttttacggacacgctacttatcttttgcgtcaaaccgcagatggtttccgcattcgtcgtcagcacagcattttgctgaatgacaaaattgattccgttttagacttctatcacgtttaaggggaatgaaaatgggacattcagttgcacttaactttgccgatggcaaaacctttttcatttcagtgaataacgatgaattgttgcttgatgcagcagttcgtcaaggaattaacctgccgttagactgccgcgaaggtgtttgtggtacctgtcagggacagtgtgaaaccggtatttatgaacaagaatatgttgatgaagatgcattaagtgagcgtgatttggccgagcgaaaaatgttagcttgccagacccgtgtaaaatctgatgcagctttttatttcgatcatgattctgctatctgtaacgctggtgataccttaaaaattgaaaccaaagtgactgcggttgagctggtttctgaaacgacagcaatcttacatcttgatgcaagcagtcacgctgaacaacttcagtttttgccgggtcagtatgctcgtttgcaaataccggatactgaagactggcgttcttattcttttgcaaatagaccaaatgcgaccaatcaattgcaatttctcattcgtctcttaccagacggtgtgatgagtaattacttacgtgaccgttgtcaggttggacaaagcctacttattgaagcaccgcttggtagtttctatttacgtgaagtagagcgaccgctggtttttgtggcaggtggaactggtttatcagctttcttgggaatgcttgataacttggttgaacagcctaactcacctgcagttcagttatattacggcgtaaatagtgaaaccgacttgtgtgaacaacagcgtttacaggcctatgcagaacagctaccaaactttagttatcacccgattgtgactaaggcaacggaaacttggcaaggtaaagccggttatatccatgagcacttaaataaagatcaactggccgaacaagcttttgatatgtatttatgtggcccaccgccaatgattgaagccgttaaaaattggttagatgagcaagctctgcaaaactaccgtatctacagcgagaaatttttacagagcaatacctcacgttaaaagtataaatagcttaaaaactactaaacctgaaatgattcaatatactcttataaggggtatattgaatttttgcatttaagttaaaagcttttatatatcaataatataaaataaaaaattccgacaaaataaattgaccagttcgcacggatttgctataagttttgatagatcttaaggaataagatcatgatgagattaagttatagcaccttattctatttctcgaatgtattaaattgatagtcaaaatccgacgtaaaaatttgagaaaatcacaataactagcagttagattggtctatatcttgcttatatctcattgtattttacgcttaacttaatttttaagtgccgtatttacttattgcacagtgaaagtttaaagcttttgcaacataggtaaatacaggagtgagccaaaagggataaatatgaaccaagccaactcccacgaactcaatggacgtcattttcaaaatgagtcgatctttactgatcataatttggtgttcgatcaccacgatttaagcgaaacctgccgcaatgtaggccaaatttttaaaccgcatgatcttaaaatctctcatcagaagcgagatttcagtgcaactatgcaccatgttaaaacaggcgcattgtctattagccgcttggaatatggcgcagatgttattattgaaccagatcatcttgataacttttacttaattcaaattccaactcaaggctatgcagaaatcgagtttggttcgcaaaagtttatttcttattctcaagttgcttctcttatttctcctcagcaatctttacgtatgcgctggcacgcgaactcaccccagcttattctaaaagtttcaaaggatgattttacttaccattgccgtcaacacattgctgattcagaaaataacttactcgtttttgaccctaaattagatttttctacccaaggtggagcctattttttacagctcgttagaacattgatggatgctttagcatgtgatcagcatccgctccatcatcctttagcctttaaacagtttgagtcaaatctatttaatgcactgatttatggtcagcccaacaatgcattacataagattgattattataaagaaaaaacggtatctccttatttcgtgaagcgtacagaagcctatattaaagaacatttacatgagccgcttaatgtcgaaattctggccgagcatgcaggcgtgagtgtgagaaccctatttactggttttaaaaattatttggggacaaccccaatgtcttatttaaaagaattacgttttgaacaagcccatttagagctcatgcacaatgaaaatctgtcggtcactgacgttgcatttaaatggggatttacccatttaggccgtttttcacaagagtacaaacgccgttatggtgagttaccttcgtctactcgccgatctggacagagtgaagggtcaggcatcattacttcaattttttcttaaattaaaaaatagataaaagccttttatatttgttgatataaaaggcttttttttatgacttaaaaatgatggacataacgaacttgtaatcgcgtaccttctggtcggttttcagtatcttgctcaaaataagcatttgcaaccaagtgatcatttttagaaaaactatacatcgcacccggaccaattgcccagacttgctcacgtcgacctttgactttttcaccatccacttcagtgtcagtgacttgttttaaccaatagccatttagtcctaaacggaactgttcggtaatagcatagtctgttgcaaaatttgcatggattgcttgccctgcctgcatatcatttgctccagcaaaggcatagcttgggtcatcatttttaaagttatagagataatggatacgcgttgaagctgtccattttggattaaaccaatatgtggcagcccaataagggtcaaatgaaacggcgttattacttgggttaatatctttttgttgattgtattcgccagtaggtaaattcacttgaaactcaaaacgatgtacaaacttcggtccttgtgcacctataactggatcaaactgaataaaaggtccgatcataatgtccccaaagccactttgggctttaatggcagcattattcaagccatcatccatgtccattttgctcacaaaaggaattaaaaaatttatgcctagactggctttatcttttactcggacattcgataaataactaatctgctcaaccagtacttgataatttaaatctgttttaggtaaaccgagtttttgtcccttggcatcgaccagtttattgctatcgtaattttgaaaataggtttgagcataccagccgggccctgcaggtaatccaccatcgagaaagctggtcatgcctaaatttacggtcggtaaatcataggcatgtgtaacccacggcaaacctaataatgtccctgctaaaaagccatgtttaattaaagtacttttcatcttcttatttcctataaaaaaatcacgaccggattgatcgtgattgtggtgaattaatgtgctaattctggatgctcagcggcaatccgatattttcctgcgtggaataccaatggttcaccttgacgctgttggtattgttcaatttgaccaataaaaatcaggtgatctccgccttcatactgatttacattgcgacaaaccaaggttgcgagtgcatccgtcaaaattggaacgcctgcattgcattgttgatgagcaatgcctgcaaatttgtcttcggcacctcgagcaaaatgccctgaaagctgatgatgctcttgtgccaacatgtgaatggcaaaatattcagcttctacaaaatcaggcaaacttggcgccgtttttgaaaggctccataaaattaatggcggatctaaagacagagatgaaaatgaattggctgtcatacctattttccggccatctttaccacgagttgtaatcacggtaacgccagttgcaaactgaccaagcaaattacgaatttctcttgggttttcagtattaatcgcttgtaaagctaaagtttcaattgtgtccatttttaaatcttcctttgatattttgaccttaagcgacttttgctgcggtttttgaagctaagaatgcctgagcttgatctgcatcaaaccaccacggagcaaaagagcgcgggtcatcaaagttattggccataattgaagcaatgctctggttttggcttgcagctgctaggagttcaacgacatgaggctctggtggtaataacaagctattggtccaagccacgactttttctgcataactccaatagcgttcaaaagtttgaaccatccattgttcactaaagctttgattatcattggctaaaatggcatcaaaatagatcttgctacacttagccgcattgtttgagccttgcccggtaattggatcattgaccactaaggcatctgccatgccaaaaatctttttgccagagggtaaggttaaaacgggcttacgtaccgtcggcgggaaacgccctgccaaataaccgccagcatcagttaattcaacatttgcgcagcgttcatattcccaaggcacaaatttcttgagtaagtccagactacattgcaggtgctgttctggtgttttcacatcttgccaacagtccattggcccatttggaataccttcaaataccataatgtcgcaaggcccattgatggttagtgccggaaatgaaaagtattccccgacttcaggaataatgttaaaagtcacacgtgaataaggtgaaattggcttcatgtttttgacgtaggtcaaagccaaagcgcgctgcggtttatcaaagacactgcgtgcatcatcacgctcaaactgtttaacgacttcacctttaccagcggcgagtaatacaagttcgtagtcgtttacgagttgttctaactcttctattcccacatcttgaatcaccaatcgaccaccacggcgttcaaactcttccatccaatatggcattttgacgcgttgatcgaccgattgagcgtagcgttcaagacgagcactccattcaaatgctttaccaccattttcaggattaactaaagctagcccaatgccttctaccgctggacattgttcttcccaaaaatttagtcccaagtcacgttcagtttgtaaagcggtatgaaacatacactggcttgacatgactttaccttgacggatttcatcagcagttcggttggtgatcatggtcacgtcatagcctgtatctaataagcccaaaccaagctgtaaaccagactgtcctgctccaacaattgcaatacggcgcataatcttctccataattttctaaatgtgcttttaaaacgctgtgctattcagctaaacgtggaatagcgggctgtaatccttcagggcccatcactgaatatccgccatcgaccgcataatctgctccggtgacaaagctcgcagcaggtgacaataaaaacaaaacaacattggcgacttcttcgggatgacccaatcggcctagcaagtggtaatcggctgccacgctatcggccttttcacggttattgccactgacttctgcaatgactcgtgaccatgtccaaccgggagaaactgaattgacgcgaataccatcggtagcaaaatccattgccatgctttgtgtgagttgacgtatcgcggctttagaaaccggatataaccagcgccctgtttgtgctactttggccgagattgaagtgaagttaacgattgaaccttgctgcttttttaggtcatggtataaagcacgactcagctcaacggtagagaccaaattaatatcgagtgcttgtaaccagtcctgacgtgaagatttaaaaccatcatctaagtaggtacatgccagattgaccaagcaactcacttcacctaaatgttggtgaatatccgccacagcttgttgaatagctgcatcactggttaaatcggtttgaataaacatcacatcatggttaaagctttctgcaatcgccttaccttttgcatcaatatctaaaatagcgacatgagcacctgcactgactaaggcttgcacaacggctttgccaatgagtgttgcaccgccgcttaccacagcgacttttcctcttaaatttatattcattgcaaatactccttaactgactggcttgccttcactacttgaccaagatggcatcaacgtattggaaggaagatcttcatcaagaagttttcgcgctgtctcaatacctgcaactggtaagcctgttgggtctaataaaccaatttgaacaagtacagacgcttggtcccagtaaatatgctcatggcacagctttgaacctctgaactgaattacacctaacattggaatttcgacgtatttaccagttggttttacacctggtaataaccagtcaatttcagcgtcgtgtgtaaagctcataatgaactcgtctaccacttgcgttgagccaacggtacgagagatcgaggtgatcttcatatctttcgggttttgatgaacaaagtgatattgataaaaacgagcaagctggctttggcctaccccaccagttaacgttggaatatggttgacataaggttctgcgaccattgttgccatagttgcggggacgtcacgcgtatcgaactcatgacgaatatgctcttcccagagtgtaactaagtcatatttcggcccaatcgtttcatgtagtgctgttactgtacgctcgtgagcaaagcgtgctgaaggtttgtggtaatggttgctttttggtcgtgcaaaggcatgatcaacaccttcgtaaacataagcttgtacatttgaatattggttaactgcatcgacaatcgcttgtctcgcatctggcggtgtaaattggtccagttctgcaatatgtaaaaccaaacgtccttttacgttagctaactcatctaaagttttttcaatgcctacaccgtaataacctacggcacatgccacttccgaaagtcgacagcctgccaaataagctagctttccacctaaacaatagccaaccacgccgagacctgtagaggtatcacattctggtcgtatctttaaaaaagctaagctgtcttgaatatcttcaacaccgaggttttcgtcatattgctgataaagttcaaaagctttttgaaaatcatctggtgtataaccgagttcaatattaggtgctacacgccaaaatagatcaggtactaaaacggtatagccttcttctgcaagaaaatctgccttttcccgcattgctgcattcaccccaaagatttcctgacaaagcaccacaccaggtccttttcctgtttctggtgtcgctagatatgcactgaactgctttccagatgcagttttaatttgaatggtttgaccagccatagtgtcaactcctgacattgttatggctttatcttctatctgaaattttttttagactgtccaaaagctgcaagcattatccaatctctgcgcaattatcaaaatcaatcaaactggataaaaattaaaaacaaagaaacatctatatttcaaaaacttaaattaaaaaattaaattactgctttttatctaatttggaaaatatggatgaagattaggacttattggatagtgaagactggctaaaaatagttcaatcaaagatacaggttttgtaacgaatacattgaattactcagggaattaaataattttaagaaggaatacatatgaaaacgatagatgcgaatacgattatcaatcgcgaaaaactgtctcccttacagtgggtggtttttattctaggcttttttgtctttttctgtgatggtctagacacaggaattattggttttgttgctccggcattactagatgactggggaattaccaagcctcaacttgcaccagttttaagtgcagccttagttggtatgtcaattggtgcaatcatttcgggacccttagccgataaatttggccgtaaaggtgttattgtttttacaagccttttgttttctatatttaccattttgtgtggctttgccaattcaactcaagacttaatgatttatcgctttattacaggtgtaggtctaggcgcggccatgccaaacatcagtactattgtctcagaatatatgcctgtaaaacgtaaagcatttcttacaggtcttgctggctgtggatttatgctgggtatttcttgtggtggtgtgctgtcagcttatctattagaaagctatggctgggctaaggttattattattggcgggagtattcccctaattttagtggttgctttattacttaaattacctgaatcaactcaatacttaattacacgtcatcaacaaggcaaagcacagcgtattttagaaaatattcaaggccattcttttcaagagccggtaaaacttgttttaactcaatcagaaactgcatcagatgaaaatccagttaaagtagttctaggaaaatatctgtggggttcaagcatgctttggctctgctgctttaccagtctgttggtgttttatcttttaacaagctggatgccaacgattttaaaaacagcaggttttagtactcaacagtttagtttaattgctgcgattttcccttttggtggtgtaattggtgcaactattatgggatggtacatggataaactgaacccaactacagtgattaaatattcatatctcattgcttttggactattcattattgctggtctggtgagctcaaatattttcttgttaggtcttactatcttcttaattggtgctttactcgctggtgcacagtcttcattactgccacttgcagctatgttctatccagcagtatgccgcgcggttggagtttcatggatgcatggtatcggtcgtatcggtgcaattttaggcgctttctttggttcgctcattttcactttcaacctaagcttaagcggtattttctttattctagcaataccaaccttcatctcatttattgcacttagcctgaaagtaatttatgagaaatctaaaaacaaacaagtgttaaagctagaagaaagtctataaatattaatcgataaataaaaaactgatttagttgcctaaatcagtttttttatttggaaaattaaatatcagaaaattttgcctttggtctcacttggattttctccaaattcttcacgatattcttgagaaaaacggcttaaatggttaaagccccagtcatacgcaagctttgaaatagaaacctttttatctgctcctgtagtgctcaagattttgtaaatttgttgaagacgatattttttcaaatacgacattgggctggtgccgtagtattgttgaaattcatcatacaattttgattttgaaaccccagccaaacgctgcaagtcttctgcacagatttcttcgtgagcatgttcaataataaaattacgaacctttcgaatataagctggctcatcttgatgtgagagtgactttaaagcttcagagtagttgttttcttgagataatagtaaggctttaattacaaaattttcatagtcttcagataacatctgtaaaccataaaaattgctatattgcgattttagctgtaaaaaattctgaatattcttccaccacgctccaatcagttgctcagagtctaagtgcatttcagggttaaaaatgataggcgtttctataggtttattcagtaaatctgcaaggacaatctgcatacttcgctcaggaataaccacctgaaattttctacagtctttatcgataatcagatcttgttgatcattatttgaaacaattaggcctctgttttcatcagattgataatgtgcaccacgaatgttgagagcttgtcgcccctgtataggtaaactaatgctataagcttttaaatttgagatgttgatagcgacgtttgcaccataactgattgtgccgattgccatttttttattaggcaaacgcattccgtcatagtggaaatcgagattatctttgtaaattgtgtctagacggtgttcaccacaaattgtggacatcagattctgcgcaaattcagctttgcgggaataatgattgagttccatctgttggctgagtgatatcatatccttttcacctagctaaaacttattgctaaaaaagcaacttgtatgccaattaatatcctttaattgacgagttttcctgaaaatatctaatcaggacatgcgtaaatattactttctcatactctattaaattttaaaaatggaaataagttaaatacctttaaagtataaatttataccttaacaaacttattttattagtttttttataacaacttatagtagagataaagcattattttgaatagtaagcgatcgtaaatttttaacgaataaaaaaccgcttatatagaataagcggcttttataaaacaattctctgtacacgataaaaatagataactcattgaaataatgtcataataattgttttctaacgacgaatactatgacacatctcaatgagttatatcttatcttaaacaaatatctaaaatggaacaagtcacatttaaagtgctttgcgctcatcatgcttgtgattattttaaagcaaacatgtaatctttcttctgcatctaaagccttgcccatcaagtgcttaccacaatcattttatcgacgtatgcagcgcttctttgcaggtcagtattttgattatcgtcaaatttctcagttgattttcaatatgttttcattcgaccaagtgcaactgactttagatagaaccaattggaaatggggaaaacgaaatattaatatcctgatgctcgcaatcgtttatcgtggaatagcgatacctatcctttggacattgcttaataaacgtggaaattcagatacgaaagagcgtattgctttgattcaacgctttatagccatttttggtaaagaccgtattgtgaatgtgttcgcagacagagagtttatcggtgagcagtggtttacatggttaattgaacaagacatcaacttctgcattcgtgttaaaaaaacttcattgtcaccaatcatttaggaaagaatcataaaattagtgatttatttcgccatcttaaagttggtcaaattgaatgtcgtaaacgacggattttggttggtcgggtgaaactatatataagtgcactacagttagaaaatggagagcttttactcgtcgtttctcctcagtttaatgccaatgctattcaggattatgcattacgctgggaaattgaaaccttattcagttgtctcaaaggacgcgggtttaatcttgaaaatacgcgcttgacagaccctagacgagtgaaaaaattgattgcggtgttagctataagcttctgttggtgttacttaacgggtgaatggcaacatgatcaaaaaaaagcgataaaaataaagaagcatggacgactctcaatgagtttatttcgctatggtttagactatgttcaaatggcgattcagcgtttaattggttttgggaaaaaagaagagtttaaggaaattttggcaattttaagaaggcagaaccctgataggataagggttctgtgaaatttgtcgtgtacagagaaaacaattaaattattgggccgtataaccgccatccatcacgacagcttggcctgttaccccacctgctttttcactcgcaaggaaaattgcataatcagcgatttcttcaacagatagcaaacgcttttgaggaaccattgccaaaattacatcctcaagtgcactgtctaaacttacattacgggttttagccaaatctgcaatttgcccacgaaccaatggtgtatctacataccccggacataaagcatttaccgtaataccatcacgtgcacattctaatgcggcaacttttgttagaccgatcacaccatgtttagcgctgttataacctgcctttccagcgaaaccaatcaagccattaattgaagccatattaataatacgaccatatttctgagctttcatgattggaaaaacatgtttaataccaataaatgccccagttaacatgacttgaactaacttttgaaaaacagccgttggaaattcttcaatagatgcaacatgttggaaaccagcattattaattaagatatcaaccgtaccaaaggtcttttgagtaagctcaatggcttgtttataattatcttcatcagtcacatcacatggtgcagataatgcatcaaaacctcgctctttaagtgagtttgctgtttcttgacacttttcagcattcatatcagaaataacaactttggcaccttcttgagcaaatttcttagcaatctctagaccgataccacttgcagaacctgtaataaaagcgaccttaccgtctaaaagttttgtcatttatttactccttaatacttataacgtgctgatttaaacaatacctgttacggtaaagaccgtaatcactacaaataccgctaatgttttaattactgtgactgcaaaaatatctttatacgattgtttatgagttaaacctgtaacagcgagtaaagtgataacagcaccattgtgcggtaaggtatccataccgcctgatgccattgcaaccacacggtgcatgacttctggtggaatacccgcagctaaaatcgcggcgttatattgttcagccatcgcacttaaagcgatactcataccaccagaagctgaaccagtaatacctgctagaacagttgtcgtcacagccccatttactagtggatttgtaaaagtactgctcattgcatgactaatcatggcaaaacccggtaatgacgcaataattgcaccgaaaccatactcagatgcggtattcatcactgctaaaagtgagccaccaatactggcattaatgccttctttgaagttcgtcactacacgctgataatcaaacaaaattgcagtaataatcccgacaatcagcgcaagaccaactgcccagatcgcaccggtttttgcaacatctacggtgtaatccgctaatccaactgcggcaaaatcaaaaccatttggataccactctttgattgctttagacaaatatttgttcattacggcaacaagaatgagaggcacaaacgctaaaaactgacgagccgtacttccattattttgcaagttcatatcggcttcaatttcttgagatggtgtattgtctacgccaaaacccgagaaaccttcgccagcttttgcagcagctcggcgacgccattctaagtaagccaaacccatgcatagaacaaaaatagcaccaataattcctagaaatggtgcggcataaatattggtgccaaagaatgtagttggaattacattttgaatttgcggtgtaccaggcaaagcatccatagtaaatgtaaatgcacccagcgcaatggttcctggaattaaacgttttggaatattcgcttgtctaaaaagctggtttgcaaagggataaattgcaaatacagcaacaaataaacttacaccgctataggttaaaattgcacctagtaatacaaccgttaaaattgctttttttgccccaatccatcttacaatggttcgagcaatagactcagcaattcctgacatttcaacgactttaccgaaaattgcgccaagcaaaaacacaagaaagtaatctttaataaagttcaccattttgggcataaaaacacccgaataaaacggcaaaacattggctgggttaatgagtaaaactgcaagtaaggcacaaattggtgccatgagaatgacagaaaagcccttgtaagctgtatacatcaacagcccaagcgaaagtagaattacaaataattcccacatatattctttctccctaaagaatagatattaggttcaataaaattaccaaaagatatttaggttatcccaaacctataatgataaaaatcacaatatctatgtgtggtaataggtaaatgagcttaaaaataaaatatcactaaaatatttaaaaacaatgtaatttatttaaatttttaaataccaataaaatacaaacacttatttggctctcttagtaaaatttaattattaaaaaaatattattgttttataaaacttattaattattgagtaaattaaattaatgtttctatattatttaataaagccaattgaataatatattttttaaattaatttaataaatattttattagttgagatcagtaattttttatctctctaaagattttctactatgtacttttaatatttaatttctactataataatataaacaatataaattaatatatagattagcgctgccagtaccccaccgattactagtgcgatctccattgaattagagggattattttctggttttctagcaaaaattaccgggtattttgcattcttaattttttcttcagcaattcgataatgctttttacctattcttataaaaataaggatacaaataataggtaaaataaatgatgagtaataaactaatgaatctactgacaatttattattgatcgcatcatcacatttatgaaaataattttgattttctttacttaatttactgattttttcaggagtaatttgactaaaatcaaaatcattacggcaaccagatataaagacatctttggcatctctagaactacttgacccactactcgtatgacgcatatgtactgttgtataagacataatattattacaaaataaaaagctaaattttattagattaataataattggcaacctaaaccttccttagctgatatttccaaatagtagcggctggatcctgcgtttcatcatactttgctaaaaacactgattaattcagctagaaaaatttactaaaataattcagcacattgagctctacttgctttttcataattttttgtcaaaaaacatcatattaggcaaattttcgtataaattactcttctaggtaagttgagtaatttaaaggaaagaaatgacgcttaaacaactaaaagcttttttggcccttgcgcgtacactcaactatgccaatgcttctttagagttacatctcagccaatctgctttaagtctcaccatcaaaagcttagaggaagagttaggcggtaaactgtttaaccgtaatacacgccgagttgagcttactcaagaaggtaaatcactcattccatatgcaaaaaaattactcgccaattgggatgaaatggaaaacgatgttaaacaacgctttaaactcaatcgtggaacattaagtattgcctcaatgccctttgtgacccatgcaattttgccagaggtgattcatcaatttttagcagtccatcccaatcttaatttttcaattcacgatattccaaatgagaccattatagaaaaagtacaagatggtatttttgagcttggtatttgttttgaacctgatctcaccgaaggtttagagtttaaaccgttgtttgaagaagacttcttagctctattacctaagagtcacccactcgctcaatcatcttctattacatggcatgagctttgttcaaatccatttgtaaccttgcaaaaaccctcaattgttcgatatttagttgagcaaaattgtttgcgaaataatataacgctcgatttaaaagttgaatgccaccaaatttcatctctttcaagtttcgttgcttatggaattggggtaagtgcaattccaaggcattttgctaaacacattgataaagaacataacgtactgattgatttaaaagacgaagccattcataaaacagtaggaattgtttataaaaagaactttgaaatttcaaatatttctgctcaatttattgaggcactggttcaatataaattttaaaaaattaaagattgtcttttagtataagttaagcttatggataagttaaattctttaattcttataatttttaatatgttgtatattgatttttaaattttttagcttatatgcgtcttaagttttgtacttaatttgatattattcattgattatacttattaatcatttaaaaaaattaacttctataacacaaaatgtgatgctaaaactagaaacactaagggatataggaaaacaacagaatgaataaagtttatgccaacgcagaggcagcactgaaagatgtaattacagacaatcaaacacttgctgttggtggttttggtttgtgtggaattccggaaaaactaattgttgcagttaagcaaagcggtgtaactggtctcacatgcatttcgaataatgcaggtgtagatgattttggtttaggtatattgcttcaaaccaaacagatcaaaaaaatgatctcttcttatgtgggtgaaaataaagaattcgagcgccaatatttaaatggtgaattagaagttgaactaaccccacaaggcaccttagctgaaaagttacgtgctggaggtgctggaattccagcattttacacacaaactggtgtaggtacactcattgctgaaggtaaagaagaacgtatttttaacggcaaaaattacattttagaagaatctttaacagccgatgtagctcttgttaaagcatataaggcagacaaggcaggtaatttagtatttcgtaaaactgctcagaattttaatcccgaatgcgcaatggctggaaaaattacaattgcagaagttgaacaggtggttgaaattggtgaattggatccggatgaaatccatttaccaggtatatatgtgaaccgcattgtattaaatgcatcacctgaaaaacgcattgagcataaaactttaagcacggaggcagtataaaatggcttggtcacgtaatgaaatggcacaacgtgctgcaaaagaactcgaagatggtttttatgtcaatttaggtattggcttacctacccttgttgccaattatattcctgaaaatattaatgtttggcttcaatctgaaaatggcttattaggtattggtgaattcccgactgaagaaactgtggatgccgatttaattaatgctgggaaacaaacggttactgctcgctctggtgcagcctttttctcaagctcagaatcttttgccatgattcgtggtggccatgtcaacattgcaattttaggtgcaatggaagtttctgaaaaaggagacttagcgaactggatgattccgggtaaaaaagtcaaaggtatgggcggtgcaatggacttggttgttggtgttcaaaaagttgttgttcttatggaacactgcgcaaaagacggtacaccaaaaatcgtgaaaaactgtagtttgcctttaacaggtaaaggtgttgttcatcgcgtaattacagacttaggcgtaatggatattacgccacaaggtgtagagctcattgaacttgctaaagacgtaacgctcgaacaaattcaagctgctacaggtgtcgagttttataaaaccttagtcgcgtaaattctaaggcttagttagctgtacaagactcaagttagtaagtgagcttgagtcttagccctatcaagcaccggatgtgctgtctataaataagaatgagaaggattttttcagctatggaaaaacagcaaggaatttttgaaagatttgctcttcggattagtgactggtctgaaaaatggtttcctgattcatatatttttgctctgcttggcgtcattattgtctctgttgccgccttgggtattggtgctccaatccatgatgtagcgacctcatttggtaatggcttctggagtcttattccctttaccctgcaaatgactatgctcattattgtaggttatgtcgtttctgtatctaagcccgtaaaattcctgatccaaaaaatggcgcgtattccaagttctggacgtggtgctattgttttggtggcaaccgttagtttattaatttcactagtcaattgggcaataagtacgattcttactgcacttttagtgattgcattagcaaaacgtaaagagctgaatatggattatcgtgctgctgcggcagctgcaatcattggtatgggagcaacttgggctcttggaattagttcatcagcagcacagcttcaggcaaataaaaccagtttacctgagtcaatttataacctaactggtgttattccatttaccgaaacgattttcctttggcaatcaattgcaatgaccattattttagtgattgtttcaatcgctattgcatattggtctgccccaaaaggcaatagcgttaaaaccattgatagttttgatgtgcaatttgaagaagaaaaaacaaatgaagcaaaatctactcgtccaggtgactggttagaaaattcgcctatcttaacgattattgtggtgattttaggcttaatctggatgttttttgaattttcaaaaagcaatcccatcattgccatttcaagtctcaacacctacaacttcgtgtttttaatgcttgggttagctttacatggcacaccacggaactttttaaatgctgttgcaaaagcagttccggcagtatcgggcatcttaattcaatttccactgtacggaagtatcgcctttattatgacccaagctttaaatagccaagacttatcgctgtcacattatattgccgaatttttcgtttcaatcgcttcaaaagaaacctttgcaattgtgatgggaatttactctgctgtacttggattttttgtaccttcaggtggtggaaaatggattattgaagccccatatgttatgcaagcagcaaatgatttaaaggttcatttaggctggtctgtacaaatttataatgcagccgaagctttaccaaacttaatcaatccattctttatgcttccaatgttaggcattttaaaactaaaagcaaaagatgtgattggttttacagtgacacagctcgttgtgcattttcctttagttttattcttgctgtggttctttggtagaacgctcagctatacccctccaactttttaatttagtggcgcctttagtttaggctaaaggcaaatttagcaaatacaccaataagagatattaagatgagttcaattgttatagtttcaggtagccgtactgcaatgggtggttttcagggtagtttatcttctctaactgctccagaacttggcgctgctgtcatccgtgaatcgatccaacgtgcaggtgttaaacctgaacaggtagatgaagtgattttcggttgcgtactcagtgcaggtattggtcaaggccctgctcgtcaagccatgcgtaaagctggcgtgcctgatcatgtcggagctgtgaccattaataaactttgcggctctgcaatgaaagctgtgttaatggcatcagataccttaaaagcaggcagtgccaatattattgtggctggcggcatggaatctatgacgaatgcaccttatattttgcctaaagctcgcggtggttatcgtatgggacacggcgaaattaaggatcatatgtttttagatggtctcgaagatgcagaaacaggtcgtttaatggggtcttttgctcaagacatggcaaataccaaaggctttacccgtgagcaaatggatgactttgcaatttcttcacttaaaaaagcgcaaactgcgattacggaaggttacttcaaagaagagattgttcctgttgaagtaaaaacccgtaaaggtgtcgaagttgttgatcaagatgagcaaccattaaaagctaatcttgagaagatcccaacattgcgtccagcttttagtaaagatgggacaattacagccgctaactcaagctcaatttctgatggtgctgctgcgttagtacttaccactgaagaatatgctcaaagtcacgggttaaatactttagcaaaaattgtggcaacttcgactcactctcagcatccaagcgaatttactattgctccaattagtgcaattcagaaagtacttgagcgtgctggttggtctgttgatgaagtagatgcttgggaaattaatgaggcttttgcgatggtggcaatggcaccaattcatgagctaggaattgatgaagcaaaagtaaacgtccatggtggtgcatgtgcattaggccatccaattggtgctacaggttcaagaattatcctttctcttatttatgcattaaaacgcttaggtaaaaagaaaggtgttgctgccctttgtattggtggtggtgaagcaacagccgttgcgattgaaatttaatttaaaattaaaagaagatgtaaggattttcttacatcttctttttataattaaaacttttaagcagttttaaatagttcataacaggtttgacggaaccatttatggctactcttgtggtgacaagacatatgccaatgttgcttaacatcataagttggaaaatcaagcggtgccggtaaaatctgtaagttctctctaaccaataaaacctgacttaaataatatggcacagtggcaatagcatctgtttcctgaacgactaatcccacccctaaataacttggtaagcgaattaaaatatttcgatccagccctttattttgcagctcatttttaatgtgataatgcccaatacccgcatcaatatcgatgtgagattcacgcatataatcctctaaagtgaaattatttgggtctaaacgtggatggctttttgagctaattacgacatagtgttgccgaaaaaacttctgctgataaaaaccttcttctaattgcggtaaaaaacctatggctagatcaatttcgccgtttgccatttgatagctagtttctggagtaataggcctaatatttaaacgaatcaaaggtgctttttcttttaaataattggttaattgcggcaacaaaaccaaatgagacacatcagtcatcgcaatcgtaaacaactgatctgaggtcaaggggtcaaagttcacattaaaattattaatactttcaaccttatcaataacttcactaatgagtggaaaaatttgctttgccagttcagtcggaatcatttcattaccgactcgaataaacaaaggatcattaaaatgttggcggattttgtttagaccattactaacgctcggctgtgtcaaaccaatggcatctgcagccattgaaacacttttgaaccgataaatatgataaaaaatatttaataatctactgtctagatcaaacaaaattgtctccgcttggactcaataatccattgaaataagctcaaagtagatatgaaagagataaatactcctatactctacttttgacttattgaaatttactctaaattatcaaagaatttagacaaggggcaatgctttatactgcctttcatcgtaaagaccaaagcataatctacttatttgcttaatttatatataaatatcgtgtacttcatcatttcaaatgagtagacgttataggtcttgctggcctttaaaaccattccatattttctgtaccgacttattatcactcaaattatttttgaagatataaatatcttgagcaaggcaatattcttgttggtctaaaatgactaattttccggctgcaagatcttcttcaacattaatttttggaatccaagccacccctagaccttgtaaaaccagctcttttaaattggtggcattatctgtttcatataacgttttatatacaagcttaccttcaatcagttgatctaccaattttcttaagtacgcgtgtttactatacgctagcagagcaaagttactttgtattgtatgtttcgggctatggtcgggttcagttgcagaaaccggtacaataaccgtttcagcaattttgataccacttaaaatatcatccccaacctttctaatattgcttttatctgcatagcaaatcataaagtcacaagcaccttcttttaacaaagacaggccttctccactattcgttgcgacaatttcaatttttaaatcacgaataagtgtaggaaatttctttaaaaaagtagttaaaaatccagaagctaaagaatgaacaacgcagaaacgaatggtcgattcagtttcatttttaatatttttaatgagttttgcggtctcctctacctgtttttcaatatttttagacatcactaataaaattcgaccaatgtctgtaaattcgatgttgtttttgttgttcctaataatgacttcagcaccaatcatttcttcaatttgttgaattcttcgagtaaatgcagactggctaataaatcttttctctgctgcttttgagattgaacgttcacgttctaatgtgaggagatcctctacccaacggacttctaaattcatcttatctattcccttttagatttgtaattttattaattgatatttttgggaagtagcataaataaatttagtgatgagaaagaatgataaaacatagggagtacctgcaaaaatgcgagaagtgaaaggacaaagccaatctataaaattaagtatttaataattctgacatagaaaagaagataagaaaataataggttttgttttcacgagacaagagatgaacataagtacaattcagctaaaaaaattatttaaatcaaacaataaaaacccatcataaaaataaataagtgaacttaacaagataacttttagaaataggcacgaacttatatttgtacattttattgataaaaaaagtccgcaccttggggaagaatgcggactgtaaactgtttcaataactgatccttatgttattgattaaatttttcagaatcttaattaagatacttttccactataaaaggtagttaaaaaatctattttcataccctttttactttgcctaacccaaaaaacatgaaaaatgattttttactctctcaatgggttggtaaggtaataattgataagaaaatgattaccttacctcatttcaggatttaagcagtcataataattgattgtatttaaatacaatatttgaaaagagtataagataaaaagataatcccgactattatactaaagtatctatttaggtgtacgcaaacgtattgagtcccctttaaaagcggtgacgattttcgcagacgggttgatcaaaatgacctaatattcaccaatcaagtagtataactttcttgaaatttcaaccatcatattagaagtatattgactgatttcaaatatctgttttttctgtggattgaaaaccatattgtctttttcatcactaaaaaaaacataagttgtgtatttatccatgtgatgaatatgctcttttaagctgagtttctcaccagagttagggtcatatgcaataaacttcattctcatgcatttgtctctttacagcgtgcttacaccttataaaatttcagtcaaaagattatttaacagacaataatcttgaatgcctaaattattgatacgatgcagtagggatattttgtttagctttttgaatagataactcagcattcttaattgattgctcagcttctttaagcatgtgcgaacttttagtttcagctttttcttcattatcccaaaggagataacaagcaaaacttcccaatattaataaagcagcagttacttttaacataaacttaataaatcaaaattttctgtattataagtatttttatgtgaaatgcatcacaattttattaaaatttattaaacaaaactcattatttacttatataaattaactttcacatgaaaaatcaaatatttttttgattttaatacacggaaatgattgcttagttttctgtataaattttgatttacttacattttcacacctttgaccaatctataaaattaaataaatatttgaatatattaaactttagaacaagtattcattctgtatacgctcatataccaacgattatttctcgactaccctcttttttgttatgcaaaaaatgcataattgctttaataaatgcattagaagtgaagcatttcgaattctaagatgaatcatctttactgattcgaagtttaatgatgaacgctgatattactacccgtattgagaaggatcttattggtcatcgagaaatcaacaatgaccattattacggagttcaaacattacgtgctttagaaaatttcaacttaacaaatagcaaagttggaaatttccctaatttaattaaagcattagctatggttaaactagcttgtgctgaagcaaactataatcttaaaaacttagatcaaactaaatttgaagcgattgaatacagctgtaatcagcttattcgtggtaatttccatgaccagtttccaatcgacatgatgcaaggcggggctggcacttcaaccaatatgaatgcaaatgaagtattggcaaacgttgctttagaatatatgggccattctaaaggtcaatatcaatacttgcatccaaataacgacattaatatgtcgcagtcaacaaatgacgtataccctactgcaattcgtttaggtttattacttagcctagatgagttaaatcttccatttaacaatttgattcttagcttcttgaataaatctcaagagtttgcacacattttaaaaatgggtcgtactcagttacaagacgctgtgcctatgacattaggtcaagagtttggtgcttttgcggtaactctacaaaaagaccttgagcaaattaatacgcttattccaaatgttttagcttatatgaatcttggcggtacagcgattggtacaggaattaccactgaatatagttaccgtgaactcgcgattcaagcacttggaaaaatctctggtaagaaaattaagtctgctcctgatctaatcgaagccacttctgatatgggtgactttgttcttttatctggtttattaaaacgtactgcaactaaactttcaaaaattgccaatgacttgcgtttactttcaagtggtccacgtactggtattaatgaaattaatttagaagcacgccaacctggtagttcgattatgccgggtaaagtaaacccagttattcctgaagcaatgaaccttgcttgcttccagatcattgcaaatgatttggctgtaactttagctgctgaagctggtcaattacagttaaatgcaatggaaccacttattgcattcaaactgtttgaatcgatggacttgcttggtaaagcaatggcaatgttccaaactaagtgtattgatacgattacggcgaaccctgaacactgtaaagctttggttgaaaattcaattggtattgtgactgcacttaacccatacctaggttatgaaactacaactcgtattgctaaaactgcaaacgaaactgggcaaagcgtattggctttagttcaaaatgaaggtttattatcagcacaagtgcttgatgatatcttatcgattaataatatggttaaaccaaaaatgtcggcttaattcctgaaataaaaaaaggagcttataaagctcctttttttatttcttctacaacttttaaaagctaaaatttgtagaaaattgagctgtgcgaggattacctaagaacagatagtcatctcccataaatgcccctacatcacgccaatatttcttattaaataagttatcaatattgaatctaaaagtagtgtcatgcccagcaaaatttgttttataggcagcaccaatattaaagacactatatccgcctacttttgcagttccctctttatttgcatatttactgctactgtattgcataccactgagtaatcttaatccttcaactgacggtactttataagataactgggctgtagcacgtactttcggtacattttgagtttgatgacctttgtaactgtcagtatcaatatcaactagacgagatttggtataggtaatgccagaacttacgtcaagtgtatcggttaaggcacctgttaaacctaactcaataccttgattgtgttgttcgccttgtgaaataaattctaattctcctgcagaatttgcagtcgtatattgattatcttgctttaaatcaaaaatagctgctgttactaagaagttccgaatttgttgcttaataccaacttcatattgttcagagtttttaggagatagaacttctagagcattattagcgaaccacggagcttcaccaccatctgataatcctttggcatatgaagcataaagattagtcgtggaagttgggctatacatgagtgctaattgtggcaagaatttgtttaaatccgtatcacggctttgctgcccatctgaattataagcttgctcatcaaggtgaatcagttttccaccgagtagagttgaccattgatcattaaattgaactcggtcagatacagtaagtgcagtctgatcactctctagagctttgtaacgatcgccagggctttccgatgaaggactgtagtcgaccgtatcttcatagatattgcctgttcctaccgctacattcagtggtgtatggtgttttaaggttttatatgtacgttgtaattcgaaagcgatttgatgctgaatgttgccagtattgaaatgaccatttaacccagcagcgaactggttagtaattcgtgtatcatctgggctgcggaagtcataaatgtcataatttccgtgtttatcaaaagtattgcccaaaccagaatattcacaaatatcgttataacatccccatgggaaagcactattatcatcaatcacaacacggctttgtgatgcacttaagctaccattccattgatcgttaaatgcatattgatatttcaaacttgcatttacactgttatttacaacaggtttactccaagactgataacccaataaacggtcttgatctacatttgttggtacttcttgcccatcaagcagttgataaccgggtactgaacgttgactttgatgctgagcttcaatatcaaacaataatttagaacgctcattaattttccagtctaaagcaactgaaccaaactcacgcttaccatttgcgtgatcaacatttggatggatgctttcatgggctaaattgattcgataaccaaaactatcattaacaaagccgcctacatccgttgccagtgtatagccgccttctgaatttgcatcgaccgtaatagttttaatatcggcaggtcttttggttacatagttaaccacaccacctggtgtcgacattccactttgaattgcagaaatgccttttaagatttcaacttgttctttattttctaaagctacattttgttcgccacgtatggtatggccattaatgagatagcttgagcctaaatcaagcgcaaaaccacgtgctacaaaatttggatagtagccaattgcagcataaccatcgcctaaggatgaatcatttttaatcacatcggtcagtgtttttgcgtgttgatctgctatacgttcagatgtaatggtggtaatagatgcaggtactttctttacatcaccagtttgaaaaccagataaactcactttttttgatgtgtatagtgcatcactattttgtgtagcgttcacagtaatggttgggagctgcgaaacctccgcttcatttgcatagacgacagatgttatgagtgcaatagatgaagccaatgctgttttagagcatgtcatgaagtgaagatttaacgaacgtctttccattgaataactacctgccataccgtgcataatttgaagcgctagaaataagtgctgagccgttttttagccacgcaagaatacagctacatatattgagaaacaacatattctgtattttttcgattaagtgaatttagttcgactttttcaacttatcattctatgaatttcctttattttcttgggaattgatactataactttttaagtattatcaaatattcaaaatacacttaagctcaaaatggcacttaaaaggagaaacagaatagaaaaatactggtattaaactagcttactgattttaaaaacaattaattatgcagttaaataaaaggaagtgttcgatcattggtaaaaaattctttaaatcgaacaaaaggacgtaatctcactagaatcgaattttaaaattagaaaaaatgaatggttaggaattctaaggacgtgctcagggtcgagtgatttttataaagttcattctattttctgtttagcccacctaaaaagttcctagtttttgtctacaaagtgatggaagtaatatgacatatactcaggaagaaaaacgtagcaggatacgtgggattgtaggcgcagcctctggtaatttagtcgaatggtttgatttttatatttatgcagtatttgctgcttactttactcaagctttaaccgcgccagatatggatagcacaaccaagtctatttatgtttggggggtgtttgccgcaagcttctttatgcgtccgattggaagctggctatttggtcgtattgcagatcgacatggccgaaagaagtcgatgatcatatcaatctgtttgatggctttaagctcctttttatttgcagctttgcctacttatgatcaagtcggtttatttgccccttttctgttactccttgttcgtttacttcaaggcttatcagtgggtggtgaatatggcgccgttgccacttatatgagtgaattaggcttaaaaggtcagcgtggtttttactcatctttccaatatgtcaccctctctggtggtcaattgcttgcaagcttactgggcgttattttgttgacgttcttaagtgaacaacaattacatgatggcggttggcgtattccatttgttattggtggtatcgcagcaatcttatctttgcttgcacgtagtcgtttagaagaaacactttctcatcaagacagcgaacgaaaagagtctggtagcttaagagaactctttaaaaagcactggaaaacctttttattagtggttggatacacttctgctggttcattaacgttttatgtagagaccgtttattcaaaaacctatttaaccaacttagggatggacggaaaaacagttggttatatcatgaccttcgccctatttgtctatatgtgtgctcaacctgtatttggtgcaatttcggaccgtattgggcgacgttcttcaatgttggcatttagcttattgtccgccatttttatttatcccgtcatggtgatcgggatgcgtgcctatatagattctccgatcatcattacattgctactcatctttatgatgatgttactcagcttctatacttctattagtggtttggtaaaagctgaaatgttcccacctcatgtgcgagctttaggtgtaggtttctcttatgcagtaggtaatgcactgtttggtggttctgcgccttcggttgccttacagtttaaagctgccggaattgaaaacaccttctttatttatgtgattgtcatgctgattatctgtttcttgtgtagccttgcgcttccgaaaaaaccagattacttagaacatgatcattaattaaatgagatgccttctgtcccaagcagaaggcatcttttagctcttagcaaattcttttaaaaaagcccacggaaaaatccctttatcatgcccatcgctaaagcaaatttgggcaccataaccttgatcaaacatagctgtcacttcaacattttgatgctctattttaatttgtttaatccgcttcgctcgacaaaagccgcatgggcaaatttctcttaaactttgatgactcagacatacgcttgagccatcggtccatataaagtgaacctgcttatttatagtgtcgacacggatatcaggtctgatttgcatacttcacctcaccaatttgatttaatccaatacgaatcgcttttcgtacttcaggatctggatcattttgatgttgttccaatagcttctgagcttctgctgtaccaatttcaccgagtgctaaagcgacttctttacgcaagttactaatttcatgcttaaagttatcagtcaaatgagcaactgccagatgtgatttaagtagtcccaagctccgtactgccgcaatacgtacttgccaatacaagtctgatacagcatgaattaaaggagcttcgagctgaacaatacgtaattttccaatcgtaagagcagcttccactcttagttgccaactttccgaagttaaagaatgttgaagtgcttggataacttcaaccgatatgttctgactataagctaaaccacctgttgcaatacggcggacctcatcatctgtatctgtttcggcaatttttgccaatatcgtaattgcttggtcttgttgtaaccaacttaatgcactgactgcctcacggcgtacaaatgcatcttcgtggtgtaccaaagcagatatctcttcaaataattgctgtggtcgtaaaggttttaaagcacgcagaattgcaccaagagcaaaagtatccgtatgctttaaatacggtgccagtatctgggccgatgccgcatttttgacttcacttaaactctggctggcagcttgtctcacattcagatcaacatcaaataaggcttgagccaatacttgcaaactggttgggtcttcccagctttctagtttttttgccgcttcttcacgaactaaagctgaagagtcgtgttgtagtgctgcatgcaaccacggaagtaaactcggattttcttcatcaccaatattcattaaagcgacaaagcgtatcttttcatctgcatgattgagctgtgcaagaaattcctgattatattcatcgatatcatctaaagcttgataataaaaactcattcgtattccttaatttgtgatttctttccaagccctaatggatttaaacggcttaactcttcttgttgagtggcttcttttaacgtttggatgcaatgttttttaatggctgtaaattcactactcgttacaagctcaacatcccgtggacgttcaaacttaagtggaatttcttcaataattcgccctggtcgatggctcataatcaacactcgatcggctaaaaaaagtgcctcatcaatatcgtgggtaataaataaaaccgacgtttgaatttcttgccaaatttcgagtaatagcatttgcatttttaaacgagtttgagcatctaacgcaccaaacggctcatccattaataaaatgcgaggttgattaatcagtactctcgcaatttcaacccgttgctgcatgccaccagaaagttcagctggaaatttatgttcaaaacctttaagtccgaccagatcaatcattttctgagcttgttcaatacgcttttgtttagcgatgcctttcatttttaaaccaaaggcaatattttcgagcacgcttttccacggaaataaggtatgttgctgaaacaccaaacctctatctggatgcggttcaaatatcgattcatcatcaaccgttaaagacccagaactaatcggtaaatgccctgccaaagcacctaataatgttgatttaccgcaaccagatgggccaagtaaacatataaactcgcccggttgtatttcgaaattaacccgatctaatgcctgaaaacgatttttagcttgccctaaatgtagagatagattttgaatacgtacatggccttgtgtaactgacattttaagacttcctcaattgataccatggagtaaatcggtttccaatcacacgcaccaatgtactgctaaacatacctaacgctcctattagcaccatgccaaccacgatattgctatagttttgcaaggtgaaagattcccatgtgaagtatccaattccatgttgccccgaaatcatttcggcagtcactaaacagaaccagcaagtgcccattccaatggataaaccagtaataatgttcggtaatgcacccggaataatgacttcatgaataatggcaagatcagaagcacctagactttttgcagatgcaacgagtcgtggatcaactgcaccaacaccatgtacggtgtttaataaaattggaaataaagccccaataaacgtaataaaaatcatagacgcttctgaggatggaaaaatcagaattgctaaaggaatccatgcaactgctggtattggacgtaatacttctaatggtggcattagaaaggcagccagtttttgataacgtcctgccaacaaaccaatgcctacaccaattagagctgcaagcacaaaaccaaccactacacgaaatacactagattcaacatgttcaaatgcagcgctgagttgaaaaaaagcccatagcgcatgaatgacatctaaaggtgtcgggacattgctaaagttcacaaagcctaaatttactttaaactgagcaagtccttgccaaatgactatccaaaaagctatggatgtaaaagcaatcacgtagctttttaaacgcgccggatatgatctcaactgctgaaaaaatttagtcaaaaatgtactttggttattaggttttgtctgggctaaactactcatttgtcacctcctgatcattaggtaagacaacacatcagctctgtgttacaagttgaatagctttaaagtcatatacttttccgccctgttgtttagcccatttttcagcatcatcttttaataaaaaagcctgaatttgtcctgttttgtctgtggcataccatgccaaattggcaagtaacttaatgtcggactgatgatcttggctataaaccacacgcaccgtttttccatcggcttgtattttctttaaatcagaaaaagcatgctcaggcgtttcatagctacgaactttttcttcaccctttacccaaatttgagttacccgatcaaatgtcttgatgggttggcccgttaaagcatcattggcaaccaaaggtgattttgcatagtcagcaagttgctggctgtaattaagtccagatgcctgaaatgcatccttaatatattggtcatcaataaatttatttacatcaagcgtaccgtcgttttttcctaaaacttttaaggtatctatcgcaatttgagtcgcttttcgatattcaggtttccacgttaagtcacgagtttgcagacctaaagggccatgaaatagataaacaacttcggcaggaatacctgttttttcagcaataatttcactatatttttctggttgttcctgaatcagacgattcgcttcaatagttgcttgtaaataagcttttatgacttcgggatgctgctgtgcataatccttgctggcaagcgaaccatgaaatgtgggtgattttgcttgagaaccatcatagatttttttggcaaaaccttggtaagcaaataactcaccaaatggtacgaagtcagcatgtgcagaaattttatgactttttaatgcaggtcccgccacttctggcgcctgagcaatcactttaatatctttatcaagttgccagccttctgcctgaatcgctcgcagcaacagtccatgagcagttgaggcaaaaggtacagaaatggtttgtccttttagttctttgagcgatgttacttttgagtcaattggaacaacaatcgcattaccgctaccattaatactgcctgacaatggcgctaaaaatatgctttcttttcctgcctttttaaatgccgctaaattattaaccgcaggaaagtcggccattgctcccaaatctaaacgcccagccaccatctcactggtcagtggtgcaccagaggtaaagtttttccattgaatgtcatatttaacgtgtttgtatttaccatctttaggcaaatattttggtaataaattcaattcacgaatgagcaacccacctgttgcacagttaatagtcgtgtcttgtgtaccaatggctacacgcacagtttctgttttactgccgcaccccaaagtgccgagtaccatggcaccaattaagctactgagtaatagttttttattgatcaatttattttgtctcatgttacgtattccaaattaattatttgagtaggtatgggatatttactttgactgcatctgttgggcagtccttttcacaaggcatgcaataccaacattcatcaaattgcatataagctttttgagttgtgggatcgattgccaataaatccattggacaaacatctacacagacagtgcatcctttatcagcaatacatttatcttcatcgataatgacgggtgcgacagtacggtgctgtacttctttaaaaataaaagccatgatttgaattcctgatttatttagtctgctagagcaacatctttttgaatgcgtaaacggtcatacgacacagcttcatcttgattaatcggaaccagataaggctcgattggctttttgaaactgaccatattgccgtgttcatcttttttcaaatgcgcgtgacagaaccaatccgagttatttttttgagggaaatctgctctatagtggtacagtccccagcggctttcttctctaaacaatgaagctcttgctgccatttccgcacaatctcgaataaaagaaacttcagcggcacgcatcagctcatgtgggtttctggcagaaattcgcttaatatcctgtttaatttcttcaaaacgcttgagcccaatttgcattttttgacgagttttaggaggctgcaaatagtcatttacaaaacggcgcagcttatattccacttgttctggaggtaaaccttctgagcaatccagtggcgcaaatattcgagctttttctgcttctatttcgctttggtttaattcgctatcttcaattgcattcacgtattgcgcagcatttacacccgcaaaccatccgtaggtaaaagcaccaagcatatagttatgaggtacagccgccatatcgccagcactatataagcctttaaccgaagtctcggctttttcattgacccatacgccagaagcactgtgtccactacagaaaccaatttctgaaatatgcatttccaccatatcttgacggtaattggttcctcgaccctcatgaaaacgtccacggcttgggcgctcattggtatgcaagatttcttcgatggtttgaatggtttcttcggccagatgatctacttttaaataaacagggccattaccactttccagttcttggtaaaactcccacatcatttgaccactccagtagtcacattcaatgaaacgttcacctttactattggcggtataacctcctaaaggcccggtcacataggcacaagccggaccgttatagtctttaatcaatggattaatctggaagcattctaaattggctagttcagcaccagcatggtatgccattgcatagccgtcacctgcattggttgggttttcataagtgcccattaaatagccggaagctggcaaacctaaacgccctgctgcaccacaacataaaatggctgctttcgttttaatgacataaaagtcaccactacgacaatcaaaaccgagtacaccattgattgcaccttgctcattttttaaaagcttcgtagtgacaatccgattattaattttgacttgagcacgctttaactgacgatataaaacttttttaacgtcatggccttcaggcattggtaaaacatatgcccccatgtgatgtactttttttactgcaaattcacccgtctcatctttttcaaacttaataccccattgatcaagctgttgaatggttgtgaaactatgcttcgcatatgcatatacagtggtttggttaactaccccatcattggcaatggtaatttctttggtgtactgctcaggtgttgcgtagcccggaatgacagcattattcagtccatccattcccattgaaatcgctccactgcgctttacattcgctttttcaatgagcaagacttttaaattggggttttcttgtttggctttaatcgcagccattggcccagcagttccaccaccaatcaccacaatatcgaactcaagatatttagtttccattgaatattccttatttttatctgagttattaacgatgaatacgtaaacggtactggaaggtatcgcccgagaaatagagatattcatagtcaataggttggccatttgcgtcatgagtcaaacgttcgacccgtaataccggagttccgatttcgacttgcaacaaagccgctaattcttcatccgctaccgtggcatcaatgcttaaatccgcatgtcccaaaggaatatcgcactcttgttctaatgccttgaaaatatcggttgtacgtaaatcaatcgctttctctttaagtttcaaaccaatatgttctggcaaataagtcaactcatacgacactggttgacggttgagtaaacggacacgttgaatttcatatacattggctttaacgggtaactttaatttcggtactacgtacattgggatctgcttaagctcggccgagatgacacggtttaaaatttcatgaccagcagatgacattgcttctgcaaaaccttgcaaacttgaaatgttctggaacgtttttggcttacttacaaaggtccctttacctggcaccttaaaaatatagccttccaactgtaattggttgagtgcttggcgaactgtgattcggcttacaccaaactgttcagcaaactcgttttcagatggaatttgactcaacacggcatattcaccatttacaattttgttcaggatgagttcccttaattgatcgtaaagaggcttgtgatttttgggatcttggggtagctggctcacggctcacaacctgttataacaacttgagcaaataatgtttaaaatgtttcagctttggaaataatttaaagcgataactttagttaaaaaaataatttcattgaatatcaataaattaataaatagttatctataaaagttgaatggttatcataaaaaatacatttgtgtttgttatgctataaaacatactccgttatgccataaacgtaaaaattaatattattttttaggggataatatgcaacaaaaacaattaaatacccctgatgattcagtggaacaagtcaccttctggcaagccttcttattttggctcaagcttggttttattagctttggggggccagctggacaaatcgctgtgatgcatcaggaactggttgaacaaaagcgctggatatcagaaaaaagatttttacatgcactgaactactgcatgttgttacccggtcctgaagcacagcagttagcaacctacattggttggcttatgcatagaactgcgggaggattggttgcaggtattctatttgtattaccctctttatttattttaattgggctatcttgggtttatataaaatttggagatgtgcctgttattgcaggtattttttacgggataaagcctgccgtcactgcaattgtctttcatgcaacttaccgtataggtagtcgttcgcttaaaaataagtttttatgggtcgtcgcgattgcagcattttttgccatttttgtcttaaagcttcctttcccgcttatcgttttaacagctggtattgctggctatttagcgagtaaaaagtacccagaactattttcctccgcgggtgggcataaagctagtcaaaaagattatggtccggcatatattgatgatgatactccgacaccagagcacgctaaattccattggtcacggttagccagacttatttttgtggcaatcgctttatggctattgccaattttagctttaggcgcatattttggatggcatcattcctatacccaaatggcttggtttttcactaaagctgcgctgcttacgtttgggggcgcttacgcggttttaccttatgtctatcaaggggctgtcaatcattttggttggctttcacctacacaaatgattgatggattggcacttggtgaaactacacccggtccactaattatggtcgttgcctttgttggttttttaggaggcgttaatcattcattactaggctctgagcatttattttttgctggagcactcggtgctgttattgtgacttggtttacctttctattttcatttgtctttatttttgcgggtgcaccgattattgaatctacacataacgaaattaaatttactgcacccctcactgcaattaccgcggctgtggtcggtgtcattttaaatttagcactattttttagttatcacgtgttatggccacagggtttttcaggccattttgatattgtcgcggccctcattactgtagctgcatttattgctttattccgatttaacattaacgtgctgtatgtcatttttgcttcggcactggttgggctcgcagtcactttcttttagttatttactgattgaattaatttcttaaaatcataatctcaataaggccgaacagttcctttactgttcggctatttatatttttaacccgctaactgggcaatttgcgctgctgcattatctaaggcagcttgacgtgcttctggtccgaaagcgattccttcggcgcgcacaaaagtgatatcagtcaccccaataaaattgaaaaacgctttgatataagtttcttgatagtctaaagcttcggctggtgaaccttctgaatacacaccaccacgcgaagaagcaataatgacacgtttcccctctactaaaccttgaggaccgttttccgtgtaacggaatgttttaccagcaacagatagacggtcaagccacgcttttaactgtgatgggaagctaaagttatacataggtgcgccaattacaacgatatctgacgataagaactcatccaaatattgggtgtttcgtgcaacacgttgttgcgctgtttcattattaggttcaacaccttgccatgctaaaaactcagcatcagacaaatgaggaattggctctaaagcaaaatcgtgatgaataatttctgcatctggataagctgtgctgagctgacgaataacagatgaggtgagttggcggctaacagactgctcacctaaaatacttgtgtcaatttgaagtagtttcatcgcttatacctacagtataaaattgttacttgagctaattatgttactactattattcttatgcacaagaaggcacatttagggaaccaagtaatatgactgtaaccatacctcatgatatccagagttcagattgccaaagagttagtcaagtattggctagagttggagagaaatggagtatactcattgtaatgacacttgcatcacatcctcatcgcttttctgaaataaagagacgtatcaatggaatatcgcagcgtatgcttacattgtgtttgcgtggtttagaacgagatgggttgattaaacgtacggtttatcctgtagttccacctcatgttgaatatgaattaactccactgggccattcacttacagaacctgtaattgctttaggccaatgggctcagcagcatattgcggatattgatgcggcaagagctgcatttgacgcagctcaggagaaaccaattacattagacacttaacgtaactgcgaaggactcatgccataaaattgtttaaagcgatgacttaaatgacttgctgaactaaacccacatactagggcaatatcttgcaaagaaagctgagatgactgaattagccctttggccttagttaagcgtctttgcatgacatattggtgaggcgccatattcatggactgtttaaacatatgagcaaaatggtattcgcttaaattcacaatatttgccaaatcagacaaagtgagtgcctgatctagatgatcttcaatccattcctgaatatatttgagtttatggggtgccagtccgcccttgatagtaggctgttgccattgaacactactatattttcgaattaagtgattcaacaataaacttgccgttgtactcatttgcaaatgatttgaagaatcttgccaatcgcaatctaacaagaagaattgatataacgcccgaatccgttcatcatcattaaatacaacttcgtttagttcaatttgattcggctctttgtcccatattttttcagcaacatcacgcaaatgttggtcagtgtagtacaagtggacaaatttaagcccaccacgtatgtcccaagttgactcctgatgttcgggcaataggcaaaaacgtcccggcccaccaccatttttccagcccgcaggtgttttttgatagctttcataaccatcttgaatataaagacttagagtgtggtgatcgctacagacacttacacgatcttgctgattagaccaaaatgcaagttgcatattttcatcaagcaccacagtttcgtgaagcttggctttagactgctgcagctgttctaaagtttgataagccatgcaaaattaaaacaaatatgattgatcttaagttaaccatattcagcaaaattcagctagtttagatctataaaaaacgcaagatcttgcatgtagaacacaagaatatatacgtgaaaaataaagcattcctagatacttaagtttggtaatcgaggatgaagttatgaatattttactctatgttgcggtggtgttgatttggggaacaacatggattggaattgccgttcaaagccattatgcaacacccgttgtcgcaattttatggcgctttgctatttcagccttattactttgggttgttttactattttcaggaaaattacagcgaattgctttaaaagatcatttgttctgtatgctgcaaggactttgtgtttttggtctaaactttatttgtttttataccgccgttaaatatgtaaatagcggtttagagtctgtcattttttcgatggccgttttctttaatgccattaatgcgcttatcttttttaagcagaaaccttccccaaactttgcaccagctgcacttttgggcctaagtggtattgttttactgttttggcatgacctgattaatagccagtttaatgcgcagttattaatgggtattgggctatgtgcaataggcacttacggtttttctttagggaacatgattagtgttagacaccaaaaacgtggtctaaatatcttttcaacaaactgttatgccatgacttatggcgcattggtgatgttaattctggctttatttacaggacaagatttaatgccgccgatgaatttcccatttttaagctcggtactatacttggctgtatttggtacggttattgggttttcagcttatttttctctggtcggacgaattggtgcagccaaagcagcctatagcacgttgctctttcctttagttgctttaacagtttctactttctttgaaggatatgagtggactttaaatgctgtatttggaattttactcatcttacttggtaactacttaatgtttagtaagtttgaaattggaaagaagttatttagcagtcaaaaaaattgtgagaagcaggcataaaagcctgctttttttataaatcataattaattttagcagccagtttttagcatcaactcaaaatcttttaaagccgcggctgctgtggctaatggcgcagatgcccctccactgacaacaaattcccccatttcttgcgttaacacccgaatacatttattagaaccttgcagatgagcaaacggatgatttgctgggactaaccttaattcaacacctgtttgaatttgctgattcttaatatgaataaaaccaaccagacgaggaattacattttcttttttccaaccacgaatatgttcagccgtaacgtgactaattccttgtcttggaatatcttgaatttttacatcagcccccaaaacagtattggctagtatcgtaattttggcagcagtatcccatccatctacatcgaaagagctgtcaggttctgcaataccttttgcttgagctttttcaagagattctgcaaatgcgcattcgtgttgcaacatatcattcaaaataaaattcgtggttccggtaaagacaccttctatttctaaaatttggcagccagctaagttatattcaaacaaatcaaccgtcggtaaagctgcagcagtggcaccgctaaaaaatagttttttattgtgctgatgtgccaagttaattagttttttaccttctacgactaaagcacctttagataccgcaatcgcattcatgttatttgttaaagcataatttaaataaaataggccttttccacctgtcacatagtcacttggtccagtctcaataatgacatctgcttgaaccttttctaaaaacttttgctctgttaggcctgcttgatattgtgttttatctagccactttgaagcttgtaaaccatcttggttaattaaacctgatgatgagttgcagacacccactaaacgggcatcaatttgatatttttgtttatagtatgtcgatcgatttaaaagaagctctgcaatttgttgcccaatccgtccaaaaccacaaattgctacattaattcgcttcatttcactttctcaaaaatttaaatggtttaaatcaattttccaaagataattttaatatctcatcttggaaaaattgctatttatagagaaggttaaaatactatatcgctcagatatttgttagattaacaatcttaataaccatataaattgcgacagcaaaaaccattaaagcaaagaccttttgtacaattgcagacggaataaaccgaatagctcggcgtcctaataacataccgaatgcacatgcgagtgcaaacgcactagtaatggcgactggatagtgaaagccctctgcaatatgcatcacaatactcatgccactaatcaggaaaataatcataagtgaggttgcaacaatgctatgcatatccaaatttgtgacttttctaagcgcgggtacaattacaaagccgccacccaccccgagcatcccagttaaaagcccagcaataatcccgatgctcgcaagcacaccaccagttttaaaattccagataaagcgtcccgtacttgggttgacctgacacggcgggttatgaaaatccgaaattcggttactaataagtcgatagccgactgtaaacatgaccaagctaaacattaacatgagccaaataggtgaaattgtgttagctattaaaataccgatatgtgccataggggcaccaattaaggcaatccagattgcagcacgataacgaactatctttttaaataagccttcaatagttccaatgagtgtagatagcgcaactgctaataacccaatcggtgcagcttgcgccacgctccagccttgactggtcataagcgcgggtacagcaagaatgccaccacccgcaccggtaagaccaagtaaaaagccaatcacaatgccttcaacgacaagtaataacatattaaaagcctaaaattgcatatacatcgtttgcagtagactgctggttaatgagtgagttgatctcgtcctcttgcgaagctttagtcacttctcaggacaaagcattgctttgtttatcctcttaactcgaacttagttctcgtcttcttgcgaagctttagtcgcttctcagggcaaagcgttgctttacttatcctattccactcgagcacagctctcgtcttcttgcgaagctttagtcgcttctcaggacaaagcgttgctttgtttatccttgctcaggtttgaccatccactcgcggcccttgagcatgccttgccaataaatcggcggtaaaatccgctctttaagcagccaagccaaacgggaaggtttttgcccatcaattacccattttggaaaacttggaagtaatttgccgccgtagccaaactcagccagaacgatttttcctcgttctaccgtaagtggacatgagccatagccgttgtactcgcagaagtttttctcacctttgagctgggctataacattcacagcaacgatcggagcttgtgtccgtgccgcagcagcagttttggcattaggtgcattcatcacatcgcctaaagcaaaaatattggcatgttgtgtgtgttgtaaggtttgaggattcacactcacccagcctgcttcatcagtgagtgtactggcacgaataaagtccggggcttgttgcggtggaacaacatgcaacatatcgaaatcagtctcgaccaatgctgcattttcatcgttcactaccttaaaccatgctttttttgcaggcccatctactttgacaagttgatggttaaaatgcagttcagtgccatatttttcaacgtattgcattagtgcaggtacatattccttcacaccaaataaaacagcaccagtgttataaaaatggatagagatatctttaagtttgccttgctttaaccagtagtcggctgaaaggtacatcgctttttgaggagcaccggcacatttaatcggcataggcggctgggtaaagattgcctttccactatttaactgttgcaccagttcccatgtatatggcgccaagtcataacgatagttagacgtcactccatttttacctaaggtttcaactaaaccttcaattccatgccaattgagttttaaaccaggacagacgaccaacgctttatattgaataggttggcatccttccaaaataacctgattatgctcagggtcgaatccagcaaccgcagctttcatccattttacttttgaaggtatcacacttgtcattgagcgtgcggttacttgtggtttgaaaataccaccaccgaccatggtccagcccggttgataataatgtgtatctgcgggatcaataatgacaatatctaaatgaggttcacgacataaaagactcgacgctacagaaattcctgctgccccagcgccaacaatcacaacgctataacaaggaattgtggctggttcatgatcacgttttaaaatacgtggcaccaagccttttaagttaaacccaagcttattacccgactcaactaacagtgctgcatcttgtggagcaacttcagccaaagcccacaaactgattgcacgcataccagagcgacaatatgctaaaacgggcttctgagcattctgataaagctgcttaaactcggtaacttgttgatcgctaattttaccactgataacaggctgatagattacgtttaggccatgtcgctgagctgcttcttcaatttcaatcacattgggttgatctgcaccttccccatctggacggttacatatcagagtttttattccttggtctgcaatttttacaatatcgttggcagtaatctggccagcaacataaaaatcttgattaactcgtttaagttccatattgccaccttataattgtgaaattgagccgcaagcctgattagcaggaagtgctttatcaatttgttttggatatggcagatttaagttattcattaattcaataaaatcttcacgcgagcgattctgacctagacgtgaattatttaagcgttcataaccaattgttgaagacagacgacctttataatcgtgtcccggatacacaatagtctcgtcaggcaggctaaaaagttgtttatgaatactgtcataaagtgtgcctgcattaccttgctggaagtcagttcgaccgcagccgtcaattaataatgcatcaccagtgaaaatcatgtttccaactaggtaactcgtacaagcattggtatgacctggtgtgtaacgcgcttcaatactgaggttgccaactttaagcatgcaaccatcagtaattaaaatatctccgcaacttacttctgagtttcggtgtaaaaccgatttgcaatgaaaccgttcacgaagtaaatctgcagcggtaatatggtctgcatgaacatgagtatctaaggtatagatgagtgtaaattgatgctgctctaattcttttgcataaatctctatatctgatgctactgggtcaattaaaacagcctctcgtgtttcttcacacccaagcatatatgtataagtcgaactttcctgctcaaaaaactgcttaaagaacatgatttataccctaataatttatttctttcctatattttgcaaataagatgccaattatttaaaattaaataataaatataaaaatcaaaaacttaatataataagtaaaactaaacttagaaaatgaactcagcttgatgttcctatgaaactcaagtatgtttcaatgaaacgattgtgaaacatataaaatggcaaagctaaattttgagtcagaacagaatttttatattttatttgagcagcttaaggctctcttcccaaatgcgagcctgtttttagcagacacaacgactcaagcaattcactataaatttaatacagatgacatttctgttgagagcatggcagcgcttactcaagaccatcataatcagtatcttgaaattaatactcctaaaatgagaaagcgattcatctatcaagaacatgatatttacatcgcagagcatcgcattatcgggaaattgcatattctacagcccgttagcatagagaatgatattgctgatcaagtagagctaacagaacaattgcaagacttggctaaagtttttaatagttgttcaccagaaatggcgcgtatgttttcaattattcaaagagtggcaattactgagtttcctgtgcttgttcgcggtgaatctggtagcggtaaagaactggtggcacaagcaattcatgattatagccaacgtaaaaataagatttttgtagcgattaactgtgctgctctcaatgccaatattctagagagtgaactttttggacatgtgaaaggtgcttttacgggagcaattcgtgaccataaaggcgtgtttgaacgtgccgctggtggaacgctgtttctggatgaaattgccgagattcctttagagcttcaagctaaattattacgggtgttagaaacaggtgaatttactcctgtaggtggtgaaaaaccaattcaggctaatgtccgcattattacagcaacacataaagctttacgcgaagaggcaaaggctgggcgtttccgtcatgatctactctaccgtctacgcgtaattccaattttcataccaccactcagagagagaaaagtcgatattcctcttattgtcgatcagattttaaaagaaagctcaacccaactcgatacaatgcctcgacatgtcaatcagaaagccatgcaggttttattgaactatgactggccaggaaatgttcgtgagcttaaaaacactctgctttatgctttaaccatggcaaatggtaaagatgaaattgaaatcgaagacttaccaaatgaactcttaaatgcagatgattacgttaaattacccgagacaaatgcagagcttagtccagaaaatgtacaagccgctttagaaaaatataatcataacctgaatatggtcgcgaatatttttggaattagccgcactactctttggcgatacagacaaaaacataagctttagctaggtatttagctcgtctaaagcgtatcatattgcacttggttaggttcgttagttcaaaggctttatatgattgttcgtgataaaagcaatgtatttaaattattatttgcttggaaaggaacaattttgccgaaggttttgcctgcactgagttttgttgtacttatttcagcctgtgtggtctggctctcttattatcattggattcaaattcctaccgtacccgcgatcggatttaccatctttggcgtgattctttcgatttgtacaggctttagaaataacgcatgttatgaccgttggtgggaaggccgcaagctctggggtgctttaattgccaatgccagacatattgttagagatagccatgttttatctaatgaacaacgtgaacatttaattcatcaggtcttaatttttagtaatttattgcgtgatcgtttacgtcaacaaacagtcgaacccacaaaatttcttgagcatgcctatttaaataactcttcacttaattatttaaatgagcatattaatgcacctcaatttgtactcgaaaatattcaaaaagatttagtcaaagctctaaaagacggcgaaattagtgacattatctatggcactctgacacgccatattgttgagctcggcaatatccaagcaggttgtgaccgaattgctgggacacctttaccctactcatattcagtacttttgcaccgtgctgtttattgtttctgcttcatcttaccttttagccttgaagctgctttaggcatttggacaccgcttattgtcggcttaatcgcttatatgtttttaggactagatgccttaagtgctcaaattgaagaaccttttggcttgcaagaaaatgatttaccgctcgattctattgtgcgtttaattgaacgagagtctctaagctctttagggcagccattaccgcctattattgaagcccaaaacaacaatttactttaataaaaaagagcgatgattcgctcttttttataggcttaagtgtctatttatggatgtacaataatcttaacggctgactcattgttatgaattaaggtttcaaaaccttgtgaaatcaaatcatcaagttgaatgcgctgcgtaataaaaggttcaagatttattttaccttcttcaaccagtttaatagtctcctgatggtcatttacataggcaattgtgccgcgtacatcaagctctttcattaccacactgtgcacattaattgatgctgggtggctccaaatcgaaacaataactataacgcctgttggtttcactgccgcgaccaaagtatctaacaccttgttaacgctactacattcaaacgcaacatcaacaccatcgccattagtaattttcatgacctcagaaacaacatcaacttctgacgggtctaaaatataatctgcaactcccgactctttggctttttctttacgtttggcacttagttcggtaatgatgaccttaagccctttcgcttttaaaattgccgaaagcaataaaccaattggccccgcaccgccaaccagtgcaatatcaccggcctttgcaccactacgtacgaaagcatgatgacccaccgataacggttcaattaaggccgcttgatctaatggaattttattggaaattggatgcacccaacggcgtttaaccgcaattttctccgataagccaccgccacgaccgcctaaaccaataaagttcatatttttggaaagatgataattatcgcccggtccagtcggcacatcatcagccacaatataaggctctacgactacatgctgaccaatttcaatatcatcgacaccttcacctacggcataaaccacacctgaaaactcatgtcccatagtaatcggcgcagattcgcctgaaataggatgcggatgtccacacggtggaataaaaattggtccttccataaattcgtgcaaatctgtaccacagattccacaccaagctaccttaatgcctacagtgccgggagtgacttctggttcagggatatcttcaatacgaatatcacctctgtcataaaaacgcgctgctttcattattatctccctcaaatcaggatgttgttttagcgatagacaattccgccgtccgttaaaatggattgacccgtaatatagtctgaatcttcacttgccagaaaagcaactaatgcggctacatcgtctggtgtttgggctctacctaaagcaatgccttccacatactttttataagtttcaccaattgcagcaccggtaatttcagcaaaacgtttatcgatttcaacccacatgtccgttccgacaattccggggcaatatccatttaccgtaataccgtgactggcatattcttttgccgcagcttgggtaagtgctcgtaccgcaaatttggttgccgagtaaataccgagtaaagcaaacccatcgtggcccgcaattgagcaagcattaatgattttacctttatgttcgcgttgtttaaattttgcagcagcagcctgtattccccacagtactccaccaatattaatatcaacaattttttggaattcatcaggtgtgatatcagcaatcgcttgaacttgtgcaattccagcgttattaatcatgacatcaaacccaccaagagcctgctcagcatgatttatagcagcatacacttgctcgcggtcactgacatcagcaataaatgtgctcgcatttacacctaaagcttgaatttcctgctgcacatcgttcagtcgatcttgtttcatatcaactaatgcaatatgtgctccttcttgcgccaagcgcagggcaatcccacggccaatgccttgggctgccccagtcactaaagcgactttattttgtaatcccttaaccatgttcaactcctgtaaatgtagaatttctacatatgaatcgctcgttgcattgaagccaaaatggattcatgcatggcttctgataatgttggatgcgggaaaatcacttgagctaaactttcatcagttgcttctagatatttcgcaatcgcaaatccttgaatatgttcggtcacttcatggcccaccatatgtgcaccaagtaattcacccgtttctgcatgtaccaccgttttaacgaaacctgacgcatctccaattgctaaagctttaccatttgcagttaaagaaaacttaccaatacgtataggtagattcttagcttttgctgcattttccgttaaaccaatacttgccacttgtggatgtgtaaaaatacaaccgggtatctggctacggtcgagtgaatggacgtttgccacaccagcgattttctcgacacatatcatggcttcatggctcgctttatgagcgagacaaggcgccccagcaacatcaccaatggcataaagccctgctacgttggttttacaatagtcatcaattgccacaaaaccttgtggattgagttctacacctaaacgttctagtcctagccctgtggtattcggctgtacaccaattgccgaaagcacgcggtcaaaaacaagcgtttgaacatcatttgccgtttcaaccacacagtggacttgctcattttcaatctgaatactttgaacgacagcatcggttaagactttcatacctttttgttcaaattgttttctgacaaattgggcaacttctgcatcttcggtcggtaaaatttgtttagccaaatcaataagggtcacctgacatcccaaatcttgataaaggctagcaaactcactaccaattgcacctgaacctacaaccagtaaacttttcggtaactgctctggaacaagcgcttctttatagctccagacatatgttccatcgacaggaagttgaggaacatgtcgggctttagctccagttgccaaaatgatatgtggtgcactcaaagcctgcctattaccttgagcatcggtcacttcaattttttctttcgctgtaagttgagcgcgaccactaaaaacagtgacctgattctttttcaacaagtaatcgatgccttgtactaattgagctgacacttgtcggctatgttgcacaagcttttgaatatcaaaatcgagttgggatacctgaaaaccaaactgtccggcatgtttaaactgggttgcgagctctgcccctgcaagcaaagctttggttggaatacagccccaatttagacaaattccgcctaaatgtcgctcttctacaattgcggtttttaacccgagctgggctgcacgaattgcagccacatacccacccggtcccgcgccaatcacaattaaatcaaattgagcttctgacatgcgggttctcctacaccaaaattaaagcagggttttcaacaaactgcttaaagctggccaagaatttcgccccaactgcgccatcaataactcggtgatcgcatgacaacgtcgctgtgacaatctcacgaaccactacattgccattttcaacaacagcacgagattccgaagcacctaatgccataattgcaccttgcggtgggttaataatggcatcgaactgtttaatgcctaacattcctaaatttgaaatgctaaagctaccaccctgaaactcgtcaggttgtaacttgccagtcttagcacgagttgccaaatcacgcatgtcatcggaaatttgtgccaacgatttttgatttgctgcttttacaatgggtgtaattaaaccgtttggaatcgctacggccaccgaaatatccgcttgagagaactgtaaaattgattgagtcgcctcatcaaattgaacattcacttcaggtactttaatcagtgccgccgccgctgccttaattagcatgtcattaatagaaagtttcacttgtggaacagtctcattaatctgcttacgtagtttttgcaaagcttctacgttgagatcgaccactaagcggaaatgcggtgcgttacgttttgcagcctgtaaccgtgaagcaatcgctttacgcatcccattcatcgccaccgtcgtaacggttgattgtggttgagttgcacattgcaaaggttgttcacttaccgacactgggttattacgatagtaaactgcctcaacatcttctttacagacacggccacgagtacctgaaacacggcagtcatttaggttaatgccccattgttttgctaaacggcgtgctacaggcgtcgctaaaatttggctatcatcagctgtagatttaaccactttagtttgagtttgctgcttaacatcaggccactgaccaccagcagcctgtacagtcttctggatgtcttgaacactaatacgtccttcacgaccagaacctgtgacttttgccaagtttacattgtgcttttctgcaagctttaacgcatgtggtgttgcaaacaaatcatcagatgtttgatagccttgtaatgactctggtacagcgtagtcccctttagctacctttgcaggagctgaagcactagctgctgtagtcagtggctgttctgctttttcagcaacaggtacagatgtttccgctttactttgttccgaaggtgctgcaggtgcttgagctgctgaaccacctagtgatgcgataaacttttcaatttctgcatcagaaacttcattatcagcacatacggcaataagtccaccaacaggtaaagtatcaccatctttcgctaaaattttacggagcgttccagcaaaaggcgcttctaacacattgacgatttttgtggtttcaatttcacaaatttcatcgcccttattaaagctatcaccctctttaatcaaccattgggcgatcgtgccttcttccatggataatccccattttgggatctccagcgttttaatttcgctcatcctaagcctccaatgtttttcgcacagcttgctcaatacgctctacacttggaatccattctttttctaaaactggagagaatggaacaggcgtatgtggtggcgttacaagttcaacaggtgctttcaaatagtggaaacctttctgtgcaactagtgcagcaacatcatgtccaaaaccacaacgtgcagctgattcatccacaataaccacacgtccagtcgacgcaacagactctaaaattccttcttcatccagaggtgaaattgtacgagggtctaccacttcaaccgaaataccatcttttgccaatttgtctgccacttcattagcacgatgtaccatcaagcctaaagcaataatggtcacgtctgtcccttcacgggtataatttgctacaccaaaaggaatagtataggcatcatctggaacttcgcctttaatgtcataaagcattttatgctcacagaacactacagggtcatcatcacgaatagcctgaattaacagccctttcacatcatatgggctagatggtactacaacttttaagcccggaaccgcagcaaatacgttatatggtgactgagaatgctgagctgccgcagagaaacctgcgccaatcatgccacgtacaaccattggtgcttttgcttttccgccaaacatataacggaatttagcggcttggttatagagcatgtcatgacacacgccatagaaatccataaacattaaatcggcaacaggacgtaaacctgttgctgcagcaccagcagccataccgataattgcagactcggtaattggcgtatcaataacacgttccgaaccaaattctgtccataaacctttggttacgcccaatacaccaccgaaaccttctaactggttttcttcagtgtttttaccgccgtgtccaccacgaacatcttcaccaacaacaaatacggttggatcacggcgcatttctgattcaatggcttctttaattgcattacgaaaacttttatttggcatctttactattcctttagtaagagacatagacgtcagtaaggagttgttctggtttcggatatgccgcagcacgggctttagcaacggcatcatcaacatttgcctttgaagctgcatcaatctcgtctagtttggcttcatcaattttgcctttgactttctcacggaaaattttcaaaggatctttattttctttgatgaactcgacttcttctttagaacgaatcaagccaggatcaccttcgaagtggccataaaaacggtttgtgatggtttcaatcacgcttggaccttcaccacggcgcgcacgttcaatggcagtttgagcggcttcatagacagcaaagaagtctgtaccatcaactttaactgccggtaaaccaaagcctgctgcacgaccagcaatgtctttacttcctactgcgtaatcatgaccagtaccttcgccaaagccgttattttcaaaaacgaaaattactggaagtttaagaacaacagccatgttcatcgcttcaaaagtaaggccttggtttgaaccaccatcacctgtaaaagacagtccgacgccaccagtctttaaggttttcgctgtcaacgctgcaccaattgctaaaggaggcccaccacccacaatcccgttggcaccgagcatacctttatctaaatcggcaatatgcatagaaccgccttttccacggcatagtccgtcatctttaccgaaaatttccagcatcatggcgtgaatatcacagccttttgcaatacagtgtccatgtccacggtgtgttgaagtgatatagtctttgtcggttaagttttcgcaaatcccgactgctacagcttcttctccgctatataagtgaataaagcctggaatatcaccattggtattttcttcatgaagtcgatcttcaaattcacgaatatcacgcatgcgtttatatgctgcgagtaattgctcttccgttaattgcatatccttttcctttattatcttgattattaaaaatcaaccaagtttcagcgagttttatatatttcgctataaataataaagctcaatttaatttaatatgctattagactaaaaagtttaaaataagttttttagctattaatttttatttttcacaaacttacgccacaaaaataaaattaaaaaattttaattcatttcatatacttgtaaaacaaacctttaaccaacctttattaatttataatatttgctgtgcactatacgcattaataaattctttatttcttatttatagaaataaggttttttattataactagtctagttgcaaatttatttaatataaaatggaattttatatatggacttaaaaaggcaaatagagacaggtattaagttaagaggaatagataaagtttctcgtattcctattaaaattttacctaccgaagaactacctaaaaaacctgaatggattcgagcaaaaataactgatttcgaagaaattcaacgtatcaaaaatttattacgccaacaaaagctacatagtgtttgtgaagaggccgcatgtccaaatctacctgaatgttttggtggtggtacggcaacatttatgattatgggagatatttgtacaagacgttgccctttctgcgatgtagcacatggtcgtccaatgcctttagatgaaaatgaacctaaacatctagctgagacggtcgctaacctaaacttaaaatatgtagtcattacctctgtagaccgtgatgatctacacgatggtggtgcagcacattttgtgaagtgtattgaagaaatcagaaaccgttgtccagatacgctaattgaaattttagttccggactttcgtggccgtttagaaacagcactctctacattaagcttatcaccacccgatgtgtttaatcataatattgagacagtgccgcgtttatataaagcaatgcgccccggttcggactatcagcattcgttaaatttattaaaacgttttaaaaaatactgtcctgatatcaaaactaaatgtggcctaatggtagggttaggagaaattgaagctgaggttattgctctactcaatgatttaaaagatcatgatgtagatttagtgactattggacaatatttacagccctctaaatcacatgcccctattcaccggtttgtgaatttacaagaatttgaaagatacactcagcatggccagcgtttaggctttaaaaatatctggagtgcgccaatggtccgttctagctattttgccgatcggcaatatttcggtgaatctgcaccaaagccattttcaagagaggatgttttgtcatagggcgaggcgaaataacaaaacttacccaataggataatagtcaaaccgtttaaaattatttaaggtaaatgaaataacgaggaaatagtcacaataagaaagctaaacctgttgagcggccacggatacgccatttcaacgataaaggaacttcgatatggatatgtcaaaacaattattattgccttctacagacaaccttccgtctttctttagaccggaaacaatctctgaaacaccttgtttaggaaaaaagccgtcactcgatctagatgcggctcctatatttgatctagatcaggaatggcaacattccttattcggtcgttcaatccaagagtgccatagaaatttgatgcatattgctgaagatgcagatatggcaattggggtgactgaccctcacggtactttactctggacatggagtagtacgcctatgcgttcatctgccgaacaagtccattttgttgaaggtggacaatggtcaacccaagcagttggtcaaaatgcaattggtcttgccctaaatacacattctgcaagttgtgtttattcacatgaaaatcagatgaacagcgttagagactgggtatgttatgcagcgcctatcaccgatgcaaacacaggccagttttacggcattatgaacttatcaactaaatatcaaaagcataactcacttggaattttagctgttgaacgctgtgccgatattgtaaagcaagccattcaacttcatcaaaagaacattttatatattaaggcgctaggcacgcctaaggttcaatacaatcaacatggcttgacactcacgcagcgtcaaatcgaaattttatgtattcttgctttatgtccggaaggcataaacctagaagagcttcactatgccttatatggcgatcgaccagtgagtaccactacactaaaagctgagctctcacagcttcgaaacctgattcccgatgtgatcgagtcacgaccatatagacttaactgtgaaattcaatgtgactttctcatggctgagcaagcactaaacttaggttttactgcaaccactttaacactgtatagaggtagttttttagccaagtcagaaagtccgtttttgtgtgcttggagagattgctttgacgcccgcttgagtcatgttatctataaaattgatgatgtagaccaactattacgtgtggttagccgtgttcctgaccgtgttgatgcagttgagcgcttacttgaacttctgcctgaagaaacaccttatcgggcaaagctcttaaaattgcttgaataaaataaaagggagaatatgtagaatattctccctttttaagatgagatcaagcagaggcttgaagctgtactctatagcaatcgtctaaagctaattcataataccgcagcccttcttccgccgcatgaaatgctttttgctgccaatcaggacgttcattacacaaacgtttaatcagctccatggcttcataaggatgtaaatcatcataatgagcatgtgcacgtaaccaggctaaagaacgcttatcaatggtaacttccggatgatccgtataagcgtgtatgcctttatagacttgaatagaccagtcacctgtcgcccattcaattgccaaattggtcgctgccagacattcagccaagttgccacggtgactcatattccaaagaaaatgattcaccgcattcatcgaagctggtgggcgaacactatcgagttgttctaccgttaatccaaaacctctagcccaatcccgataccactgtaaatggcgctcttcaaccttaatattttgaattaaccaatctcttgtttcagtaacgccaggttctgcaaaagcagttgctttagctaacgcaccagccatataggacgggaaatgcgctactaatggatagaaattaagtaaagcataacggaaactttctaggctcaatcccccattggccatttcagtaaaaaacggatgtttactcacccgctccttcactggtaaaagatcctcccaaaaccgctgagaccatccattatgcggcgtaatttctaaactcattccatattgatttagagcagtcattgctaattttcctatttatatgacagcaatcatctgtacttcacggctataagtctatccgaaaatgataaagatacaatctttaatcgaccatttgtaattttttctcaaaggtttcgaatctttagataattgtgacgctaatcattgaaatgtcgtgatttttatcacaattagggggcgtaaaaatcattacttttttaaaaaatctgtattattattttaaataaaccacacattatataaccaatacttttagatggaactttaataaaacaagtctcattttatgccaacttccaatatagagagcattaattatgaagttgcaaggttccaatatattgggacaggaacaaatagatttattaaccacacgcggattaaatttcgtatggtttccaaagcaacttgaaacgatatatcgttttcaatatcaaaatggtgcagcctatgagtttcgctatagagcacctattattttaatattatatttatttttaagctttggtatataccaagtcttaccaaccgaacaagttttatcctggttaagctattattcttgggtaggcataattgttttaatcgcctggattttatcatttattaaaaaattaaatcagtggtttgattattatgtcggaattggctcttccgctgccgttgccataacatttattttaattaacgttttagaaaatggccaagataatgtactttttcatgcagcaatgatgtatgccattgtgattatctatggtgcggtaggcatgcgtttttatactgccattattgcaggatgggtcggcggtcttattggtattttggtaagcacctatttgaacggagacatagactggaccttcttgaaccgtacatatacgtttagtagtttcttaggcatgacccttgcctatgctacggatcgtcagcaccgtgaaaactatttacaaaactgtatgattgagctcaaccgtattgaactcatgcaacaagctcaacaactgtcactgctttctcaacaagatgctttaaccgggcttgctaaccgacgttatcttgatgaaacacttgataatgaatggcgacgcgcattacgccatgagactcctcttactattatgatggttgatattgacttctttaaaccatataacgatagcttaggccatctcaagggtgatcagtgtttaaaagatattgcgactgcaatttcctcaattgctgctcgtagtggcgatttggttgcccgttatggcggtgaagaattcttacttctgttcccaatgacaaatgcacaacaagccaaaattcaggccgaaagattaatgaatgcaattaagaaaattgctattgttcatccatgtagtagtgtttcaccatacgtaaccattagtgttggcgtggcgaccacaattccacgtttaaatgattcaatttctgcttttgttagtcgtgctgatcatgcgctctatcaggcaaaaacaaatggccgcaatcaatatcaaattgctttgaatgaagaacaaattgtagatctaacttaatgatttatttttaaggtaatcatgtgatttcaataaaaatagaaaagccacataattttgtttatgtggctttttaaatacgctgattagaactgactatggttcgattggcgcaaatggaggaacaacatccgcgttttgagcacggtggcgtaagaaatgatccattagaactatcgctaacattgcttctgcaatcggagttgctcgaacgcccacacacgggtcatgacggcctttagttaacacatcagtatcttcacgatttaaattaatcgttttacccggagtagtaatacttgctgttggttttagtgcaatcgccacacgaatggtctggccacttgaaataccacctaaaataccaccagcatgatttgctagaaaaccatggctagtcaattcgtcacgtgtttcatgtccgaactgtcctgctacagcaaaaccatcaccaatttcaacacctttaaccgcattaatactcatcattgcatgtgcaatatcagcatctaaacgatcaaagacaggctcaccccaacctacaggaactttttcggctaaaatttctaacttagcaccgcaacttgtaccttgctcacgtaaagatgtaactaatgcttcaaaacgaggaacagcatctacatcgccacagaaaaatggattatttggaacttcattccaatctagtttttcagcaacttcattaccaatttgagtcacatgaccgcgaatcacaacaccaaatttttctgctagatatttcttcgcaatagcaccagctgcaacacgcatagcagtttcacgagcacttgaacgaccaccgccgcgatagtcgcggaaaccatacttttgcgtataagtgtaatctgcgtgacccggtctaaaagtttgtgcaatatttccataatctttcgatttttggtctgtattgcgaatgagtaaaccaattggcgtaccagtagttttaccctcaaacacaccagaaatgatttcaacctgatcaggctctttacgctgagtcgcaaatttcgaggttcccggcttacggcgatccagatctttttgcaaatcttcttcagttaatgcaaggcctggtggcactccatcaacaattgccattaaaccaaccccatgcgattcaccgcatgtagtcacacgaaagagttgtccaatactgttccctgccatatgtacaactccttaaacttgttcttcaaataattttctataacgacgacattgttcagcagtcaaagcaaaaatacctgaaccacctttttggaaagtaagccagttgaaatcaactgtattaaagttttggcgcattgcccattcagagttaccgacttcaataacaataagaccatcttccgttaagtaatctgccgcttgagcaagcattttacgaaccaggtctaaaccatcttggcctgctgccaatgcaagttcaggttcatgtaaaaactcttccggcaagtcagccatgtcttcggcatcaacatacggagggttacttacaattaaatcgtattggttttcagctggaattttttcaaataaatccgactcaagtaatgcaacttggtattgtttattgtgatgttcaacattaattgatgctacttctaaagcttctttagagatgtctgttgcatctacttctgcatcaggataagcataagctaaagctaccgcaatacagccagaacctgtacacatatctaaaatacgttgtggagttttaggcttggtattttctggtaagttattaagcgcttcacgcatttggccattttcatctaaacaatatggcgcaaaacgttgctcaattaactctgcaattggtgagcgagggataagtacgcgctcatccacataaaatggcttattaaagaaataagctaaatttaataaataagaagtcggaatacgctcattaatacggcgttccaacaagcttaagaattctgctttttcacttggtaaaagcttcgcatctaaaatctctgaatctgctgaccattcaagagataaggtttgtaaaactaatgcagagctttctgcgaaataatcttcagtaccttgtcctaaatgtgcatcatattgacgtaatgctgacaccccaaaacgaataaaatctcgaattgttgataaattttcagcagcttcctgtaaatgttcagggctaatcgtcggtcgctccacttaggcgtctccaaaggcaaattttgcaaagtgactattctactgagtgaggtagtgcaaagcaacgctttgccttgtgaaccagtgttttacatatctatctcgaacagtcatggctcaaaaacaaaatactttgttttaattaagaaataatgaacttttaagtagggtgaaatttagtctataaaataaaaaagcggcctttcaaaatgggccactctttaagtatttttagtttaaagcttaagtttttctgccacataatcagaatctttatcgccacgacccgacagatttaccacgatcatggtttctttcgacagttttggcgcttcacgtattgcccatgcgacagcatgtgagctttcaagcgcaggaacaataccttcaactcgtgataaggtcataaacgcatctaaacattcttggtcagttgcaatgctatattccacacggcctaaatcttttaagaaactatgttgtggcccaacaccaggatagtccaatcctgaagcgatagaatgcacaggtaaaggttcaccagcctcattttcaagaacataacatgccataccatgaatttggcttggtttacctaatgttagggttgccgaatgcatatttgtatctagcccatgcccagcaggttcaactcctacaagtttcacatctgaatcatttaaaaaagctgtaaaggcaccgattgcatttgaaccgccaccgacacatgcgacaacataatctgggtttttaccaaatcgttgatgcgtctgctctttaatttccttaccaataattgattgaaaatctcgaaccattttaggaaatggatggggaccaaccacagaaccaatcgcataaataaagtttttaggatcttttaaatattcttcaaacgcgctatctacagcatcttttaaggttgctgtaccgcgagttactgacaccaaatgagcgcccaaaattttcattttgaccacatttggatgttctttttcaatatcaacttgccccatgtggatttcacatggaatacccactagagcacaagctgttgctaaagcaaccccatgttgacccgcacccgtttcggcaataactttctttttgcccatatatttagcaagtagagcctcacctaaacagtgattaattttatgggcacccgtatgatttaagtcttcacgctttaaataaatttgtgcgccacctaactgttctgaaaggcgttttgcataaaataaaggacttggacggccgacataatttgcaaagaggtctgctaattcattttgaaattctggtgtatggcgaatttcttcataagcaacattaatttcatccattgcttcttttaaatgcggaggaataaactgacctccatactcaccaaaaaatccttgttcatttggtaaagcaataccattaatttgatgttgcatatcatccctctttttaaattattaaagttatcaagtttatcgagaaaggtaacgcgttaagtcctcaatgccttttagagtcattggatacatgtggttttcaaaaatctctttaatccaaccaattgtttgagtgtaatgccaatacccttctgtttcagggtttaaccatgctgttttatcaaaatgctgacgtaagcgacgtaaccaaacttcacctgcttcatcattcatatattcaaccgagccacctaccgatttcagctcatacggtgccatactggcatcacctacgacaattacacgatagtcacgtccataggtatgaaacaagtcccatgtgttcatgcgagtagctgttcttcggtagttatctttccaaacatagtcataaagacaattatggaaataaaagtattcaagcgttttaaattctgttttagctgcgctaaataacttttcacattgggcaatatgtgcatccatcgaaccacctacatcaaacaacatgagcactttgattcgatttcgacgctctggcaccatttgaacgtcaagaataccctgcttggccgtttcacggattgtaccgtcaacgtctaactcttcggcagcaccgtgtcttgcaaatttacgtaaacgtcgtaaagcaatttgcatttggcgggtaccaagaacttggtcatcatctagattttggtatttacgctgttcccagactttaaccgccgaacgcttacggcccggcccaccaattctgatgccttccggatggtcaccaaaagccccaaaaggtgaagttccacccgtgccaaccatacggttaccaccttgatgttttttatgctgttcacgtaaacgctcttctagcattttcatcagttcttctaaagaacctgctttttgaagttcagctctttgctctggtgttaaatgcttttctagaagttctaagtcgaaccagtcttttggtaatttatgaacttgtttgagtaactcatcaatatcaaaggtttctatgccatcaaagtaatctttcatggcacgatcgaacttatcaaaaaaacgttcatctttaactaaaatggttttagcaagttgatagaactcttcttgatcggcaaaaactagcccttcgcttactgcacgatttaagtcaatcagttcacgagtcgtaactggaacaccatattttcgtaaggtgtaaaataaccgcacaaacatgggttattccctcctttaacgtcgcgacatgaaagccaaacgttcaagcagttgcacatcttgttcgtttttaatgagtgcgccatacaaaggtggaatagcttttgatgtatctcgattacgtagtacatcttcaggcatatcatctgccataagcagactcaaccaatcgatcagttcagatgtagatggtggtttcttcaagttaggaatttcacggagcttgaagaaaacttgaagcgcttcatttaccaaagttgcagagatattcgggaaatgtaccgagataatttcgcgcatcgttgcttcatctgggaactcaatgtaatggaagaaacagcgacgcaagaaagcatctggtaattctttttcattatttgaagtaataattacgattggacgttgagtagctgtaattgtttcgcctgtttcataaacataaaaagacattttatcaagttcatgtaacaggtcatttggaaattcaatgtctgccttatcaatttcatcaattaaaagcacacagcgctcttcactggtgaaagcttcccacaatttaccgggcttaatatagttcttaatatcgtaaacacgatcatcacccagttggctatcacgcaaacgagacacagcatcgtattcatataagccttgctgtgccttagtcgttgacttgatgtgccaagtaatgagttttaaaccaagactttctgccacttgctcggcaagtaaagtcttacctgtacccggctcacctttaaccaataaaggcttttgcaaagcacgagctgcttttacagcaagtttaagactatcagtcgcgatatattgatctgtaccggtaaaatgttgggtatcagcagacatgtagagaccttatttttctatttcaatggttagatggaacgcatgcttttgtttgttatatattttgaccaacaatagccaataaccaaacctagaccgattacaaacagaattaaggataaatttgaccagattaaaggactgtctttagttaaaacaccaaatagtagtccaaaaatagctggcgctacagatgcattaggcccttctgaaacagtcggtgtcaccaaaatagcaaaaacaactaaccagcttattgcgcccaaagtggtaggtaagcggcgcattaaacgccaccagcaccacaaggcaataatagcgccaacgccataagctgttaaagcaataatctcttcaggaattgcatcgagagaagaaagtaattgatttaaaattccagcttgatcttcacgcaccacgtaagccctctggttcaactgcatttgggttaattaacccttctggcggcatctgaataaagaagccttttgtttgtaatgagtctagaacatgtaaaacatttacacgcgctaatttacgtgttggagccaattctaaatgcatgacaaacgttgcacggccaaaggcttgtaaaacagcttctggaactttttcaaacggatcggcttgctccgtttcatcaggatagtttggacgagcaatataaatgtacatttcatcttttttgctcgatctataaatatcacagtgcatttcaaatcaactcttgaactaaggacagcatacatgaaaaaaaacgacagacacacgcgggtttgtttacgcatcagtcgttttttcttttcttgcgaaatattaacccacaacaatcattaaggtcgataaataacttttaattttccaaagttttaaattttcaaccttcattaactctttaattttacataaaaaatctttttgtcgacttttataaaataaaaattttacattttaaaaacaataaaatttgaactaaagcagatagcctttgatttaatctattgaattttataaatttatggttaagtataaagttaaataagctctaaataagattcaacttatgtatacaggataagacattatttaaccgtttttgatttttaatatgattcaataatagaagatcttaaaagaaaatatggaggtctatgctatgtctcgtggcgacaaatcatcttatacagcaaaacaaaaacgtcaggcgaaacatattgttgagagtgaagtagatagaggtcactctcaagaagaagctgaacgtattgcatggtctaccgtcaataaacaagatggcggcggcaagaaaaaatcacattaaaactaccactggatacttctttagttagctctatgactaaagaagtatcttatcaacatgttaacgcaagcattaaaagattcttgagccttgcatataatcattacttacctgatttagagtatttaagattatatggttatcttgagtacgtaaggcttcatttaagcgattcatgtaattcactaacatttctttcgaagcttgagcgaactcggtagttaccgcttcaccttcatataagatgacataactacgggcaaacccataaatgagataaattacagctttttcgtttaggtctgatgagtgtttgagatggtgttcacaggcactttttaaattcttaaatgcatctgtaccagtagattgatttttgaaagatgaaagtattgtttggaagttcatatccatattccactcaaaaagtaaaactacagaagaaggataaacctgtcaaacaatatgttgattattatgaatttagattgtaaaaaattataaaaaacgcccaaaaccatgagcgttttcattgaacaaaagcttagaaactgacttcaatattgactgttgtaccagattgctcaatattggttgagacattaaaacctcgtatttttaactcttcctctacctgtgtgatatgttcaggatgcaaagtatctattggaaattgaaaaactgcccgtcgcttaccttctttcgagatttcctcggttccagataaaattttttctaacaatagtgcttgatctatttttacgtctttcgcattttttcttgcctgttcagcattaaaactattcgtcatatttatatctctaattattagtagttttcatttataacataaaaaaattgatctcaatattagcttattattgattttaaaaactttttacacctccatatataaaattagaggcctcctctccccgagaaggcctctatatttctgcaccgaaacaaacttatagttatatattgtttattttgaaattgtttttcttgctaccaagaatatacagacctgtatatatacacaattgaatttttctcactaataaagttaatttaattcagcatgactttctataattaagattaactcatatttttataatttaaactttattaaatcagcagaatgtaaaatcaaactaaacaaaaagttaatcttataaagactaacttattaaatgattttattttaaagttatattaacgaacaccaactgatcagttattaatcagataagttattttgaatcttaaaattcaatttaactgaaaatttttcttaatacctaaacctaaaataaaagactagctctctcttctttaaataactgaataagcggcttagttaaaagctcatagcgccaacccaataaataatctggaagatcctgttcatcacctttagtaagcacatgctgatgaattgcatttaaccatttcttacgtagtaaaacttctttaggtatagaggtttgttctatcgctttagcaatcaatgcatccattttattcagggtttctttggatgtaattttaaaaggtttagcaattttagctggccagtgcccttcaacaggtaagtcttttaaaagatcaagaataatctttccatattcacgaacaacattcggacgaatatcttttacttgagataattggaaactattgcgtggatttttttcgactaaatcaatcatcgtcgaatttctaaggataaaactacgtggctggtttgttgctctaaccacctcttcacgccactcacttaaattttgcaattgcattaattgacgacgtgaatgacgataattgcccacatctgtatataacaatggggttggtgtttcactaataatttctttggttaaactactacaatcctcaagaacatactcataaagccctttttgtttgagctgatctttaatatggttagccaattgcatgaggtataaaacatcatttgccgcatagcatagctgttgcggagacaaaggacgtgctaaccagtctgatcgagtctgatccttttcaatatcaatctctaaacaaagctttaatgcaccttgataacttacttgtaaaccatgtcccaaaaaggataatccaacttgagtatcaaaaacatttaataggttttgttcatcggcatagtgatagattaaatcaatatcttcaccacatgcatgaaaaatattttgttgagcaagaaagatttttttccaaaactcgcttaaatctaaagacactccatctagcaaatatacatttccgttgacattgacttgacatactccaagtttaggccaaagggtatcaaccttaataaattctgtatcaagcccataagttgaacattgatccatttgttgaagaacatcaaccaattcggtttgctgttggataaactgaaacatgctttctcaagtaaatgcaaagagtgctttaaactctggtatatataacataggattagaaaaatgctactgaatccttgatgaataatctatttttgaacaattttccaaaaaagagataattttttgatcattattttaaatttttcaaatttaatgtccttctaaatatttattttttacaaaagctttttttaatttatatattcactgagtcgtttttaaaaatatgtttttgtcttttaaaaagatttttagataatacgatattattcaaaaaatctttgaaataagcaccgaggtacttatttcatacgcatacggttatgaacagcctgacttaaggtatgactatccacatattcaagctcgccaccttgtggtacgccttgcgcaatacgtgtcatgtgaataggtaaatgcttcgtcgcttcaaccaaataatgcgctgtcgcctgaccttccacagtagcattagttgccaaaatgacttcttcgatcgtaccttggcttaaccgttggattagataaggaatgcctatttcttctggcccgattccatctaatggagaaaggtgtccacccaacacatggtatttgccacgaaaactaccactttgctcgattgccataacatctgccggggactcaactacacaaagcaattgatcatctctttctgttgaagcgcaaatatcacaaatttcgtgctctgttaaagagtggcaaacactacattcatgaatataacttgatgcttcatgtagagcatgtgctaaagcaaatgcaccttcacgatttttcatcaaaagatgtaaagccatacgttgggccgacttcggtccaacgctaggcaaaatacgtaaagcttgaacgagttgttcaaatctatcactaaacactgattttccttagaacatgcctgctaaaccaggaggtaaacccataccagagttagctttttgcattttttcttcagaaactacttcagcttgacgcacagcatcattcaccgcagctgcgattaagtcttcaatcatgtctggttcgtcttgaagtaattctggattaatttcgatacgttttacgatataacggccagtcattgttactttaactaaaccaccacccgcttcagcgtgtacttcagtttgagcaagctcttctttagccttttttatatttgattccatatctttttgcatgcgctgcgcttgctgcatgagcatattgatattcataaacctaactccgtatctctatcaaatatttcaagtattattgatagtcatataacacttcggaacttaaactctttgaacgcccctatcgatcagtaagatcattgaggtcagtacgtttaaatcaaaattaatccgcaattctgacacaataaattaatgttttctattggtatctatgaaactcttttaggtaactcatccatttaaagctttctatacgaaactttttactgcgaaggccagttctaaaatttaagttaagctactgcgaggcttggagggtgctattgtcgggtttatattcatttaaaggaattttctgaaaagaggcattcgctttttctattgtatgatcagcttcttcaactgatttatttgcatcattaatcaatagaacagtttcgttaatttgagtcggttcatccttttgggcaaatactttgtatccaaccaaaccaattgcccctatagcaactaaaataattataggtttaagcatggttaaaaactcactttgttatttttattaaatttagaacttttatacgttgtgatttttaattcatttacaacaaaatgtagcttttttatttcaatcgttgtttatgagtaacttatcttaaagtaaagccacactaaaatgagtgtggcttaattcttagatatataaattttattagatcaaatctaatccacgtgagatatcaccaataatatcgttaatatcttctaagccaaccgaaacgcggattaagccttcttgaataccagcagcttcttttgcttcaacagaaagtttgccatgagttgtggttgctggatgggtaatcgtcgatttcacatcacctagattaccagtaatcgagataaacttagtattatcaataaccttccacgcgccttcacgctcacctttaactacaaaagaaacaatcccgccaaagccattttgctgttttgctgcaagttcatgaccttcatgagttggaagcccgccataatagaccttttctactttttcatgggtagacaaccactcggcaagtttttgagcattttcacagtgcgctttcatacgtaaacgtaaagtttctaatccttttaagaaaatccatgcattaaacggactcatagatggccctaaagtacgcactacgctaaaaacttcttctaggagttgatggttacctaccactgcaccacctaacgcacggccttggccatctaaatatttagtcgcagagtaaatcacgagatctgcacccaactttaacggttgctgtaaaacaggtgtacagaaactattgtcaacagcaagtaatgcgccatttgcatgcgcaatatctgcaagtgcttggatatctgcgatttcagctaatggattagatggtgactcaacaaataatagtttagtttctggacgtactgcatttttccatgcatttaaatcgcttagatccacaaatgtgatatctacaccaaacttggcaatgtacttttcaaataaagcaacaatagaaccaaaaactgctcttgagcaaataacatgatcacctgcttttagatacgccatcgcaattgatagaattgctcccatacctgagcttgtagccacggcacgttcagccccatctaaagctgctaaacgtttttcgaacatcgatacagtcggattagtaaaacgagaatagatatttccttgaacctgaccagaaaattttgcagctgcttcagcagcgttttcatatacaaaagatgaagtcaaaaaaattggttcaccatgctcaccttcaaaactacgagtgtgtccggtacgaatggctaaagtatcaagttggtattctaaatcatcagactggttcattaaatgttcgcctttactggtcatgtactaaaaactatcatcattttgagtgcctaaggtatttaaggtcaaggtaaacctgaaaattatcgcttagacttcaatcaatctttagtatagttggtaaaacaagatgaaacgcttaaagtcccttgtctcagaacaaagtcaaatcaagcacctctctacccgactatttcgtcctcaaacattagtattgtcacaaagcactccatttgaagtgattggtgaattcaaccaaacccgtgttcgttattatgcagctacagaaaagagctttagagaaccattagtatttgtggcacctttagctattaatatggcgatttatgatttatatccatatcgttctcttatcaaatacttccaaaatgcaggttttgacgtataccttgtcgattgggggcgtttaggctttaaagatagacatcttaactttttatcgtttattgaagattttattcctaaagctatagagcttgtacgcacacattcaggcagtgatcaagtttctctacacggatggagtatggctggcatattcgttactttatatacagcgcataatcatccgaattatgtcaaaaaccttatagttttaggtagcccaatcgatagctatgcttctggttatattggaaaactctaccgaaccataaacaacactattgcccgcaataaaaagcttcaggaacgtatctactcaggtttaccgaagcgtttaattcataccccgggcattttaaattccttaggctttaaaattcttgaccctaaaggctggttcgatggtcatattcaattacttaagaaccttaataatcttcagttcgtacaagaacatgccacattaagcagttttttaaacaatatgattgattatccgggaggtattaatcaggacatgttatttaatgtttggctgcaaaatccattaatacaaggttctattcagttaaaagataaaaaaatcgaattgaaaaatatcgactgttcactcttagttggagctggtcgtagtgatcaattagtgacggcagatgcagctcagccattaagtcagttaaccagtagccaagatgttacatttactcttattcctggcggtcatttaggtctaatgtcaagccaagcaagtgcgcaggaattctggccaaagctagcaacatggctgagtgagcgttcaacaaaaatctaaatttaggcataaaaaagccctctatatgagggcttttatctaacgctttctctatgaaaacaaacctaagctaaaactcattagaaggatagttttttaaatacaaagtatccgaccttactttcaaaacttccgtctttttgaatattaaaatactttttaacaacatctgctgcattttcttggagatacttaagcgtttttatttgatcttcaggtgtcttcatgcgctgtacccaactatcaaaatctagtttgagggtttgtttctctaaagttgttaattcaaacccagcatcttcaataaagtgaacccagtctttaatactgtaatttcttacatgactagggtctcgaatcacttctatagtctgtaaaaatgtatctaaaatagggaaacttgagctaataatatcaacaaaaataacagtgccatttggctttaatacacgatttatttctttcattgctgttggtacatgctgccaatgatgggcagaatatcgactaataattacatcaaactgttcatcagtaaaaggcatatcttcagcaataccttgctgtacaaaaatattttttatttttcgagcattggcagcttttgaaactgtatcgagcatttcatgagataaatcgtaagcaaaaaccagatctgcatggcgagcaacgttataagctacatgaccaccaccgcaacctaaatctaaaacaacggcatttggatattcatcaatttctttaatgaatttatcaaactcgaccccttcagagtgagcggtgctattcaaataacttaaagatttattttgatactgttttaaatttatctcatgttgattcaacatggcttattcctcttctttgatgagttaaccataaaagaaaaagtagataaaaaataatgattagtttttcaataattaataaaataaagttatagtttgtatctctatcaattcttaataaaaaaaccaccatatggtggtttttttatgtaaggccaagttcatatttaaaaattactttgcagtaaatttaatattgaactttcttacttgttttctaacttccggattaaaaggtaaaacaaagggacttgcacgccatatcgccttttcaatactcgacttaaacttttggtcttctttatctagaaaaataatttgctcaatctcaccagtatcacttaaaaagactttaacgctagcactcattcccactgaagaaggcggaacattccaaattttaaagatctttttttgatattgttgcttgtacttttctgcttctacaataattttctcatcatcactttttgctggtgataataacttagaattaattgtgcacccacttaataacaatatagaagttaaaataatgacgtttttcatttataaaaccaattttttcaacgattaaaatttaacattttatctttttaaaaaccacctaaatggtggttttatgctaaatagctactattaaatatgttcttagcaaattctagattttagctaatttacgaggattatttagtttaactatttaattataattttcagcatcgttttaaaaagatattttataacgtgaatttatacttgagcgttcaggcatatcagcaatatcctgctcagtaaaaattccatgttcaagtactttagtgccattaaaggcagtattgaccggagtaacaggcgatttagtaatataattttcatctgctttttgtgttaacgatgcacacccatctaaaccaaatcctgtagccaatacaagtaacaatctcttcatctgtcttacctgttattataaaaatcagacaatctaacaaattatcgactgattgtcacatttttaaaacgattaggactagccaattctttacaaaaactcaatgaaatgtaaagtaatttgcataaagtgttaaattgtgtaaaatacctaaataatttaatgatatgttttaacttatgatctttttacttttcttatttttgttatttacctttgtactcctcttaaatgcacattacaaacactaggtatttgtatctgttcttctcatctgctaaatattttttgaaaaattaattattttcttaaaagcgttcacttactttctttagtctagatttttataaatacaaaaaaagcccgctttgtaagcaggctttaccctttttgattttttgcgctgatcattcaggacttttgctgtttgtgacagcgctcggatattacacttatacttaaagattaaaaagactaatcttttttaaactgatgcatttactcatcaatttcaatcggatcgccgtcttcaggacgaatatgtcgtgtcccatcatcagcaggatcgacactagagccatctttagtaatcgagttatacatttcgtcctcttttttatcgtctatgaattcttcatcttcaaaatcaagaggctcgtcatcatcttcaaaatttaaaggcttttcttcatctatcatgtgaaccatccttttttaagctatgtgatttcatgctcaaataaatatcggatatattcaacagtgaacacacattatttatgtaaagaatacttaaaaattattaaaatatataaaaagttaaatagggttattcaaaatattttaagaactcttctaactcaggtaaatgtgcaaagtttttatgagcatcccctaacacaacccaatcatgttttgactctatacaaaaattaagttttaaatctggtttaaacggttgttcaagaagccccaacggtatccacatatagtttgtaccattaattttattagggacaggcgagccacatctattacaaaatgatgaagtaaaaccagtttcttttttataggtagccacatattccttacccatcaaccaattaaactgattttcttttactaaagtagcggcattcgctccagtcccagtttgttttcggcataagctgcaatggcagtgataaaccgttttgatttcacaaagtacagagaattttactttatggcataaacaagaaccgatgttactcatataacgtacttatttcattactataaaaattttaatcatgactttaaatattggttaagtatatattttaattgtttaatataaaatatatctaatcttttgatttaaaaaagattataaaaaagatcttgatatataaagcttttttatattataaggtgaaatgtgactttaaataacacttgagtaattaatagtcattgaaatattgggaataaaccttatattgagtacaggttcatacctttaactgaggaaaagctcatgaataaattaatggttgcggtattcgctggaatggtgacccttgccggtttcagtgctcaagctgcaacacctgagcaagaatgtcaaaaattgcaagatgattacaatttgatttatgcatcaaaaggcttttgttttaaagaccaagatgctaaagaaaaatatggtaatgaaaactgtcatacgactaagccaaaattctctgataaagagcagcaacgtctagacgcaattaaagaacgtcaaaaagaattgaagtgtaaatagtatttaaaggaataatacatggcatatgatgatcaaaatatcttcgcaaaaattttacgtggtgaacttccagcgataaaactctatgaagatgatcaagttctagcttttatggatattatgccccaagccgatggtcatgcattagttattccaaaaactcctgcagtaactttacttgatttacctcctgaagcggcagcttataccatccagatcgtgcaaaaaattgctaaggcaatggaaactgcattaaatttggatggaattgtgctcatgcagttatcaggagcagctgccggacaaactgtccctcatgttcattttcacctaattcctacaaatgttcaccaacttggcaaacatgcggcgcaattaggagaccaagataaaatcaaagctttggctgagaaaattaaagcagcactttgattttaagagataaaagcggagtttaaactccgctttttttatttaaaaagtgtaataaaatcaaaagaaaataaagtatttccaatttttaattgtcataaaactgtcatttcttcttcactccattgtcacaaagtttacagatacttcttagcaagttggtgagcttctgtaactttttgtacataagccaactaaaaaataaaagttagctaggcatacgccatttaaaaataccttttggagaaatctcaatgaagaaattgcttctcgctgccgcagttgcaactttgagcgtaaacgcggtgcaagcagcgccaactttgtacggcaaactaaacgtttccattaaccaagttgacaacaaaaatttcgatggtaaaagtgacgttaccgaagttaactcaaactcttctcgtattggggtaaaaggtgaagagaagttgactgataagctatctgctgtttatttagctgaatgggcaatttctactgatggttctggttcagatactgaccttagcgcccgtaaccgttttatcggtttaaaaactgaaggcgtcggtacgttaaaagtaggtaaatatgattcttacttcaaaacctctgctggtagtaaccaagacatctttaacgatgacacacgtttagatattacaaatattatgtacggtgaaaaccgcttagataacgtggttggttttgaattagaccctaaattattagctggtttaacattcaatatcatggctcaaactggtgaaagcacttctgatagcaaaaaaggcgaaactggtaaagacagcaaaaatgatagcttcgattcagtttcgacttctctaggttatgaaaataaagacttaggtttagcaatcgctgctgctggtgacttcggtatcaaaggtaaatatgctgcttacggtttgaaagatgtttatacagacgcttaccgtgtaactggttcttatgacattgctaaatctggttttgtagtaggtgctttatggcaacatgctgaacctactgatgacttgactgcatatggtcaaacatataaatcagatggttcaatcgataaagctggtaaagcttaccgtggtttagaagaagaagcatacgcggtaactgctgcttataaaattcctaacactaaacttaaagtaaaagcagaatatgcttctgctgaaacacaagtaagtggtcaggcagatcgtaaaattgacttgtatggtttaggtcttgattatcaaatcaataaacaagctcgcttctacggtatcgttgctcaacaaaaacgtgactggttgaatgacgacgacaaacaaactgttgtaggtactggtattgaatataacttctaatcagttatgttcgattcatatctaaaataaaagggcttatgcccttttattgtgctatcaaaaaagccgatatttttatatcggcttttaaaaaatttatatcttattttaagaaaccacttacaagattcatcacattttgaatatcttggttagcttcttgatgatctgtactctcaccttgaggtgttaaagaatcaatgacttgaggtaagacagaagcgattgcaccataaacttgttcttttggtgcttgagcttgctgagcaacttgttcaatgtctgctggattaaacagactttgtaattgctgggtcggaacttcactattactttggtttggatcaacccaactttgaacttggctacctaagccagcgccttttaatttctcaagagcagcttgtaaaccaccttgttgctgaacccaacctaagattaaaggtaccactgcaattaataaactttgtacaccaccaccagtttgaggtgtgttgttattaccagtgacttgtcctaatacagaacccaatactccaccaagaccaccttgggcaccagatgaagtattaccacccatttgtcctagtacagaacctaaaattccacctaaaccaccttgacctgacgcttgctgattcccacctaaagcttgcttagccaaaacttctacaatgttgcttaaatttgtcatgagtaactcttatgtatggtttatacatgagcatacgcgtttttttgttaagacagcaaaaatcaaattgttaaattttgaaagagatcgcaaggtcttttaccaacggaatttattccaattttctggatttgcccaaaattttgaattaaaccagtctgggacatgcttataggtcaaaatattaaattgccataaagcaaaatcactatcatgtgaagtcttatcaataagttgtgtaaaacctaaagaacgcagaagctgttcatcactgcgcttgcttactacaacaattcgttttgctaataaatctcttagctttactaataattgtgatttttgcacatcgctgatgtcctgcatttcatcagtatcaaacaatacaaaacccaaatcataacgctgagtaaaaggcagacttaacagctcagttacggtaaaatagtgccattgaattgcgttattctggtcaattttctggccaatacaaagtgcagtatgaataggctgttcgtttgataaatcgtctagcatagaagtgatgacattttgttcagccataactgcaacccttaattgaaagatgtgagtttaaactttatggaactacaaggcatttgccataaaatgcatgcaggcctaaaagatgctagtgtaactgatcaacagacaaccaaggcaaatgttgaatacaaatttgtattagaccgttcagaaattgatcttccttttaatttaggacaagaactagaaatcgaatggacaggtaatatttattgcacttcttgtggtgctaaaacaccaaagtcttattcgcaaggccactgctttaaatgctttaaaacgaaagcggaatgtgacctttgcattatgaaacctgaaacatgccactaccatttgggtacatgtcgtgaagatgattttgcccacagcgtatgtttccagcctcatattgtgtatttggcaaattcaagtgctttaaaagtaggtattactcgtgttagccatatgcctggtcgttggttagatcaaggggcaactcaagccttacctattttaaaagttggttcacgtcgtttatccggccagcttgaaaccatgtttggttccttaattgcggataagacagattggcgtaaacttctcaaaggcgaagctgaacctctaaatttgattgaacaacgtgatcagttaattgaagagttcgcccctaaaattcaaactattcgtgaagaatttagtcaaaaccttgaatttaacgaaacggttgaattactagaaaatgaattgccacgtgagtttgtttatccagttgaacaatatcctgaaaaaattaagtctttaaacttagataaaacaccaaaaattcgtggtgtattgcaaggtattaaaggccaatatttaatttttgatattggtgttattaatatccgtaaatatacaggttacgagctgattgtacgtgcataagtcgatttaaaaaagcctcataaaaatggggctttttaatcaatataactaagataatctatttctgaataaccaagctgctaaaggtaaagttactattcccagcacaatcattggtaaaaagttcaatttgacttgtgcaaagcttgcaccttccaaataaacccgctgtaccaagttaattccaaatcttaatggatttgcataagttgctacttgtaatgcttttggcatgttttctacaggtgtcagtaagcctgaaagtaacatcaaaggcataatcaataaaaatgtaaaaagcatggcttgttgcatatttaatgataaagctgaaattgataagcccacaccaactacagccacgttaaagctgaataatccaaaataaaccagtccaatagagccattcattggaattttaaaccagaacaaaataatcaataaaataatggtcgattgcatcaaacctacaaaaatcggcggcaaagccttaccaatcataatttgtaatggcgtatagggtgtcactaataattgatcaaacgtaccctgctcacgttcacgcgcaactgataaagcagataaaagtaatgtctgcatcatacttaatgctgcaattaatgcaggcattaagctccaacgagactcctgatttgggttgtaccatgttcttgtttcaaggctaatcggtaaagctgaattaaacttttgctgattgaactgaccaataattttacttagatatgaccctgcgaccatagctgtagatgaatttctaccatcaacaatgatctgtataggagagctttggttattgtttaatttactctcgaaatcattggggatcgtaattacgagcaatgcctgacgattatcaataacctgtttgatttgttcggtatattccagtgtggcagcacgcttaaaaataccagagccatcgagcttcgagatcagctcatgtgaaacctgcccgttgctctgatctaaaattgcataatctacatggttaacgtcataagtagccgcatagccaaataaaagtgcttgcatcagggcgggtacaaatagaatagccctatttgcaggatcactaaaaatggttaagaattcttttttgactaaaaaacttaattgtttcagccacgtgattaattgctgccacataactttatctcaaccgttttttcagtgaaaagttcacagcacatatcaaaacaacgatatatcccaataaaataccgcactctttaaaccatagcttccaatcatcacctcccataaataaagttttaattaaaaccataaaatgcgtcgctggaagtaactggctaataatttgcacaaccaaaggcaaattgcgtgtatcaaaaacaaatccggaaagcatcagcgctggcataaaacttgccaacaaagcaatttgactcgcctgaaactgactttgggcaaagccagatatagttaaaccaagtaataatgaaacgattaaatatagaaatgaagcaaataaaattgagaataatgaactgcgcatagggacttcaaaaataaaatgtgcagcaacaatacaaataacgatatcaatcatgccgacaacaacgtacggaatgagttttgccaacacaatttcaaatggccgtactggtgtgacaaataaggcttctaatgttccccgttccctttcacgggcaataaccagaccagttaaaaatgcgccaattaaagttaaaatgagtaccattaaacccggcactaaaaaccaagtactgttaccagattcgttaaaccatattctttgttcaattttaacggcgcttgcagatgctaatattgggctacgatcaatttgtattgatggcgcggtagccaaagcacccgcgacatacccctctaaagcagttgctatggtggtcgatctaccatttaatagcaattgaacctttgcgttaccttgttgggtctgacttgcaaaatcggaaggcaaatgcaaaatcgcatcaattttgccatttcgaatggcctgttctgcttcaggcaaattatgaaattctaaactggttaaatatcgcgatccatttaagccagctaagacctgattgacctgcggcgaggactgatcaactacaacaccaactcgtgcttggttcaagtcaaaagaaagcccataaccaaaaagtaaaattaagataacaggcaaaactaggccaattccgagactgcttttgtcacgaagaagctgtttagtttctttccgaactaaggctttcaagcgactccaaaatgcaaagctcattgtaggtctcctaacccgcatgccttaatgcacgtgcttgttccacaattgcaataaaagcctcattcatatcaacaatatgtttatctttacttgccaattcgcggacctgttgaggagaacctagggctagtaactttcctgcatctagtatggcaatgcggtcacaatattctgcttcctccataaaatgggtggtaataatgatggtaatgccttgatttgcgagtttaccaatgctgtaccaaaataaacgccgtgcaagcgggtctattccactcgtaggttcgtctaaaaataaaatttctggttcatgtaataatgcagccgccatagataagcgctgtttataaccaccaggtaaatcaccgcttttaatttgcggctttaaatcatattgttgtaaagctttatcaatttgttgatttagttttttgcccgataaaccataggctccaccaaaaaacttcaaattttctaaaacagttaaattgctatacagtgcaaatttttgagagacgtagcctactttagctcttgcttcagcacgggccgtccgtaagtttttacctgcaacttctaggtaaccgctacttgccggtagtaacccacataacatgcggaatgtcgtggttttaccagctccatttggcccaagtaacccaaagatctctccacgctgtacagtaaatgacgtattggcaacagcagtaaaatctccaaaagttctgactaaatctttaactacaataaccgcttggtctgattgcgaattattgttttgttcggatcgaaaagcctgctgagaaatagagatttgttgtttttgattttgctgtaacaacatcataaaagcatcttcgagttcaggtggtcgcctatttgccactagccccagaggtaaaatatttgttgatagttctttttggcggctaataaagtttacttgctctccccttggcactgcatcaataatctctccagaatttccaagcaactgggcttgtacaatccgagtcttaatctgctctgaaggttttatttgccatgtttgctcatgtactaacgcttttaattgctcaggtgaaccttgtcttaaaattttgccttcatgcatgatatatacgtaagcgcacttttctgcttcatccatataagcggtacttataattacgcttaaattttcttcctgaacaagttgttcgataatgatccataaatcccgtcttgataaaggatctactccaacactaggctcatcaagcaagagtaactctggggaacgaactagagtacatgccaatcctagtttttgcttcattccaccagaaagttgccctgctagacgttgagtaaactgagtaagatccgttatttccaataaacgtttaaatctttggttacgtacattttttggaacgccgtgtaagtcggcatataaatttagattctcttgtacacttaagtcttcatagagtccaaaacgttgtggcatataactaatacggtcttggacaacttgaggatgtttttcaatatcaaacccgagcacatgaagagaacctgaactcgctttatataatcctgcaattaaccttaataaagttgttttacccgcaccatctgggccgactaaagcggcaagttctccttttttgatttgcatattcaaatcaacaattgcactaatatctgctgaatttttattttcggctttaaaagtcatgaataaattatgggcttgaaccactgctttactatcaatcataggctttctcacttaaagcaagtgggacatttactgtcacaggttgacccatttttaattgatcattcggatcatgtacatacacccgaacttcgtaaacaagtgttgttctaatctcttctgtctgtactgttttaggtgtgaactcagccactgaagatatatagccaatttttccattcataggctgattcggataagcatcacgaatgacttgagccgtgtctcccattttaattgaacttaaatcttgttcatttacataaacacgaatccattttggattggtcaaggctaatgtataaacggccttttgagcagttgtcatgtcgccaacttcttgcaaccgagctcgtaccactgcatttacaggagaccttagttctgcttgagtaaggttatagttaattaaatctaaattagccttagtcacttcatactgtgctctggttgcttcacgatcttcttttcgtgcacctttaattaataattctaaattggcttgtctttcacggaccgctgcctcagcactatgttgattacttttggcatagtcgagttcttgttggctaattgctcgaccatcggtactacttaccaaaatttgtaagcgttgcaagtttttattggttttatcaagctcagcttgggcagacgcaagttgagcttttgcttgggtgatttcttcagggcgagctccaacctcttgtttaacaattgcctcttgttgagctttaagttgtgcttgagcttgctttgcctgaatttgtaatgcattggtattaagggtcgccagtacttgacctgcttgaactttatcgccctcttgaactaaaagtttctgaatacggccagactgttcaaatgcaagtgaaacttggcggatatccacatttccatataaagttaatacattattatctaattgttttttatgattatatccccatacccaaaagccgatggcaactacagctataacaactaaaatgccggcaatcacttttttattcatctttttggccttcttattaaattcaaatttacatagtttaaattcaatttaaatttaaattaccttaatctttgaataaaagatatacttttatgatgaaataaaattaggtttaaacatgtccagatctagacgaagtgatggtgacttaacaaagactaaaattattgaggcagcaggacccttaatcgcccaatatggttttgcaaaaacagcaaacaaaacaattgccaaagtagcaaatgtcgatttagcagcaattaattatcactttgatggtcgagatggactatatcaagcagtgttaatggaagctcatgcccattatctagatgaacaatacttactagaacttgttgaaagtacttaccctcccgaagaaaaattgagtttattacttgaaactttattacataagttgacggaaaaagatgtttggcatggcaaagtttttattcgcgaactgttttcaccttctgagcatttattaaattttattgaattaactggtatgagaaaattttttcttattcgaaagttgattagtcaagtggcgaacttagatgaaaatgatccggccgttttaccttgtattttaagcgtgatgaccccttgcatgatgcttattattgccgggcctaatgctcaagcacctgagccacttaaaaatattgctcagatgccattacatgatttagttgaacattttaaaaaattttcattagctggattaaaagcaattagccaatcaaatcttaaaaattagctattcaaacattgcaaaatggcttgaaccggatcttctgtatttccagaaataagctgtttatgcatagttaaatgttgcattacttgaatttgagcggtttctacattcattagtttttctatttcagccgctaaattttcaggtgttgcatctgcctgaatcagctcttcaattacttttttacccgcgatgatatttggcaaagagtaataaggtattttcaccaagaatttagcaattaaataagttagccaatgcagtttatagaaagtgaccattggtctatgcatgagcattgcttctaatgtcgccgttccagacgctaaagcaataatgtcactcgcgttcatgaccatacgaccaattttcgattcactatccgtattttctaaaatatgaatttttgcttttaactgcggtgctaattgttcaaccccctgctcaatctgctgtttgcgcgcatcattaattgccggaattaaaaactgaatatctggatattttgtatgcaaaatattggctgcccccaatagcataggaagaagcctttctacttcacccttgcggctaccgggcaacaaagcaatatgtttttgattttcatcaacacccaattcttgtttagcaatttgaatagggttctcaagcggtaattgtttagctaatggatggcctacaaatgccgctggaacttcatattgttcataaaaaactttttcaaaaggaaataagcaaagtactaaatctatactttgtttgatgccatgtactcgcccttggcgccatgcccaaactgatggactcacatattgaactgtttttattggaagattcttttctttgatacttttcgaaagtctgaggttaaagtctggtgcatcaataccaataaaaatatcaactggatgctgagtccattgattaattaagccatcacgtacggcgaatagtttttttaagtcttttaatacttcaacaatgcccatcacagacagagtttccattgggtaataactgttaaaaccttccgcaatcatttgagggccaccgattccctcaaattcagcatcgattccctgctcgcgaaaactacgcatgagttttacgccgagcgtatctccagaaacttctccaactacaatgcctattttaagttttcggtttgccaaggcgatttacccaagaatttgaaataacgcattctagcatagagacttattaatcttgaacttgcctaatcaatcccagctaaacctagccctagcacatcactatctaaaattacattcatacactatcttttaatctaaattaacaatgttatttgaattgtagcttacatttacaaacaataaaataaatgagaattatttacattatctttaatcttatgaatatcccacctcgaccatttaagttgtctgtaatcgcctgcgcgatttgttatgccaacctcacctatgcccaagatacacaggtacaagctttgcaaacgattcaagtcaaagcatcaaatgcagagcagtcttctgaacagaccaaggcatataatgttaaaaactcgagtagtgcaaccaagcttaatattgaggctaaggaaacaccccaaaccattaatgtcgttactcgtcagcaaattgaagattttggccttaccagtactcgtgatgttttaagaaatacccctggtgtaacagtctctaatcaagaaactgagcgaactacttatatggctcgtggttttgagatttcaaatatcttaacggatggcgtaggcttccctctttcaggttataactataataatacgaatcctgatacttacttttatgatcgtgtagaagtagttaaaggagctgactcgttaactaatgcctttggcgatccgagtgcaaccatcaataatattcgaaaacgtccaacccaagaatttcaagcaagcggtggtgtaagttacggttcatgggatacgcagcgctatgaagctgacgtatctggctcaattctaccaagtggaaaagtacgtggccgtattatgggctatgaacaaactggtgattcttacctagaccgatattctgcggaaaaaaacggctttgctggtattgttgaagccgatttaacagatagcactttacttaccgcaggttatagccaagaacaaaataaacctaatgcaaataactggggtgcactacctttattagatgccaacggtaaacaaatttcatatgatcgctcatataaccctaaccctgactgggcgcactgggataatgagacacaaaatgcttttgttgaattaaaacaaaaaattaatgatcaatggaatgctaagctgacttacaactatcttgatacgaagcataatagccgtcttctctattactatggttacccaaaagctgatgggtccggtgtttctctaacgccttggggtggacaagaacatcaagaaaaacatgctgtagattttaatctcgaagggacctataagctatttaaccgagaacatgaagcaactctaggctacagctatgtacgtaatcatcaacaagataaacaatctacaggaacgattaacgatagtaatgttataaagtcaactactaccgattgggcaagttggacaccgcaatctataacttggtcagatttcacagaagcggctaactataaacaaaatattaactcaatttatgccgcgacacgtttacatcttaatgaagatttaaaacttttacttggtgcaaactatgttcaagctgagagtaaaggcgaaagttatagctcaccaatgtcatatagtgaaagtaaagtttctccatatgtcggattaacctataattttacacctgaatatacgggttacatgagttatacctctattttccgtccacaaactggtattgataaagataccaatcaagctttaaaacctattgagggtaaaagctatgaaatgggtgtaaaaagctcatggctagatgaccgtttaacaggcacactttcagtatttaaaactgaacaaaacaattaccctttacgtaactcggatggaaacccacttaaccggaaagtaccaacgagtgatctggaatcgcaaggtgtagaggtcggtctatcaggtcaaattactgataacgtaaatctttctttcggctatgctcaatttagtattaaagatactaaaaatggtggcgaagcaagaacatacaatccaaaccagacacttaacttgctaactacctatactccgccagttttacctaagcttaaagttggtgcaggtttacagtggcaagatgggataaagttatatgactcaaatgtaaacggtacgatcaaacaagatgcatatgctttagtcaatttaatggcaagctatgaagtcaatgatcatattacgcttcaagcaaatggtaataatatttttgacaagaaatatttaaatagtttcccagatgggcaggctttttatggtgccccagccaactatacagttgctgtaaagtttaaatattaatagcgtagccaatcccaatttggggttggctttcttttttatttttttatgtgtcagtaaatatgtccagaactttaaatcttcccatgttatatcgcataaaagttttctatcgattcttagttgttttcggtatgggttatgcctgtatggtgtacttaagtcttggactaactgaaattttccatttgaatttagacaaaccagaagctatctatttggcggcctttatttctattttgttttatgtatttttcgtgattgttggtttctgcatccaatcattattgcgactgaccattttatcaatcgcattatttgcccttttctttattgtgacacggacggtaggttatgcataaaggtatacgtcaatctatggcatggctccactcgtggactggtttaatttttggatggctcgtatttgctatttttttaatgggaagtttgtcttattaccgccatgaaattaatttgtggatgcaaccaccccttgcacaatttgaaataaaacaagatgtggcaattaaaacggcatatcaatacttacaagaacacgcttcagatgctaaatcttggtatttaactgttgctacacctgaaagtccggtaaatacgatgtattgggaaaaaccagatggtagttatggaaatgcaaccctcgatgcaaacactggtcaagaattaaaactttctgcgactgaaggcggtgactttttctaccgtttccattatcaactttttggtgtcccgatattaattgggcggttggtcgtatctttagcagcttttattatgttgattgccttaatctcaggcattattactcataaaaaaatcttcaccgatttttttaccttgcgtacctttaaatcgcagcgctcatggttagattttcataatgtttcatctgttattgcactgcccttctttttaacagttacttttactggcttggctattttcttctatctatatttgccttggggaatgcaaaaactctatccagagaatccatatcaatatttcaatgatatacgtacaaaaacagtcacagaaagtacaacaccgcatcctgcacagaatttaccagttgaaaagctattagcccaacttaaacagcgttggggaaatcaaactttagcaactatgagtgttaaaaacccaaatacgaatcaggctcaaattacgttcattcagcaagaagaccattctattacccgcaatcaagcacaaatcacattagatgctacaaatgctaaagtcttgggtgatacacgtaatcatagtcctattgccacactttatgctggagtatatggcctacatatggcaacttttgctcagcctctacttcgcttaggattgtttttctctggcattttaggctgtgtaatgattgcctctggcttgttgctttggagtcttaaacgccaacttcaaagtaaaaatagtcagtttcatttagggcactatttagttgaccgtttaaatgttgctacctttgtaggtttgccttgtgcaactcttgcttatttgtatgcgaatcgattgtttactgtcacggccaccactgttaattatgaaatttatagtttcttcttcgtgtggctcatgagctttattattgcgctcatcactaaaaaacaatatttatggcaaactcagctaggtatttttattctgcttagtattgcactccctatcttgaatataagttatttactgaaaaataattatattcaaaactttagtggttattgggattttgtacgtatagatatatttttctggttatttgcagctttagccttttttatatttcttaaaattaagcctattcaatataaagcttcagataaaattcaaaaaaagctgagtaagttaaatattgaggtgaattcatgatgttctttgtgtttatcctgactttactaggcatgtatttactattcatatcgactgaaaaatatcgctcaccgaaatcaactggtcatttcaaatctttagctcaaaaatattattcattgttgaggatattggcctttttattatttgcgttgagcgggtttattctcatcaaaaaatatggtttttcaattggttttgtcagctggtggatctttgcaacacccttaacctttttgctgatactttggcttaatccgctcaagccatcaaaaacttcctctaagtcatcaatttgaataaaatttcctcaagctaagcatgattttgattgcttagcttttttttgcataagtaaatcattattcatgacaactgtttatctctaaaaggaataagatatctgcgtttcgtgataagtggcgataaagatgtctggtgcttttgaatttatcttggcaggtatgttagttggcttctgtgtaggtattacaggagttggtggtggatcattaatgacaccaattttaattggtctttttaggattgaaccgcatatcgcaattggtactgatttactttacgccgcgatctctaagttctgtggatcgatggttcacgcaaaaaaacttaatatcgtctggccgattgttttatggctagcggtcggtagtattcctgcatcttttggtactgcgtgggtacttgagcattatttaagtcagtcaactcattataaagctgtattaaccatggtattaggctttatgttgaccttaactggtgtttctatcattttccgtactcggattgaaaagttctttaataaattccgaaataaagagaatactcaaactgaaaatgagcaattagctgttcaaaataaacgcacctatattgtgattatggggattattttgggcgtattcgtaacactatcatcagtcggcgctggtgcctttggaattatggcacttgtaatcatgttccctaacttaccaatgattcgtattattggttccgatgtcgtacatgcagtattactaaccttagttgctggtctgggacatatgagtgccggtaacgtcgactttatgctacttatgtggttgttggtaggttctattccggcaattattattggaacattaattagctcacgtatgccagaacgtttaatccgtaaaattttgggtattacactatttgctcttggtgttaactttatggtccacccagtcaaagccaaaccaaaaacagctgtggtacaacaagcagtagttgctgaaaaaacaggcaactcgaccgaaagatagtaaaatcaatgggatttttccaaactgaattgccatgagatgtagtattttcataattatttcatggtatattcagtacacaaaacaacctttagtatgatcgaaccagtgacagcaatgactacacattcaaattccgtttctaagccagatatcgacgacgttaatattaaaagcattcaaactcttgtaacaccaaatgagcttaagtcagaacttccgttatctgatgttgcttcgcaaactgttctaaaaggccgcgaaactattcgtaatattttagatggttcagataaacgtttatttgtcgttattggtccttgctctattcatgatccaaaagctgctcacgaatatgctgatcgcctaaaagcgctaagcgaaaaggttaaagatactttatatctagttatgcgtgtttattttgaaaaaccacgtaccacaattggctggaaaggcttaattaatgatccggatatgaatgactcatttaacatcgaaaaaggtttacgtattggtcgtaaacttttgcttgagttaaatgaaaaaggtttaccttgtgcaactgaagcacttgaccctaactctccacagtactatcaagacttaatttcttggtctgcgattggtgcacgtacaaccgaaagccaaactcaccgcgaaatgtcttctggtctatcatcaccagtaggttttaaaaatggtacagacggcggtttaactgttgcaaccaatgccatgcagtctgttaaatatggccatagtttcttaggcttaaatgaagacggtcaggtttcaatcattaatacaaaaggtaacccttatgcacacgtggtattacgtggcggtaatggtaaaccaaactacgatgctggctctgttgcagaagcagaaaacgctttagcgaaagcaaaagtgagcaacaaaattatgattgatgcaagccacgctaactcgaataaagacccttacttacagccgcttgttcttaaaaacattactgaacagattttagacggcaataagtcaattgtaggtattatggtcgaaagtcatctaaaaggcggccgtcaagatattcctgacaatctttgtgaccttgaatatggcaaatcagtaacggatggttgtattgactgggaaactactgaaaagacattgcttgaaatgcatgaagctttaaaagaagttttaccaaaccgctaattcatctttttgagattgaaaattaagccctcattttttgagggcttttttattttattgaggtggaatttaacatcaaactaaataaaaataacttacgacaaaagtaaaaatcagtacagtttcacctatttcaatcgctgcaccgacggtatcccctgtaataccgccaatcctttttataaacacatgtcttaaataaacaagactgattaaaaaactaatgatagcaataagcccttgccactcccaatacaaaggtaataacagaacgaacccagttattatccatgaagcagttttgggtaaatggtctgtcaaagaacggcctaagcctttttcgcggacatatggtgtagttaaaaacaaaatagatggcaccacacgcccaaggataggaatgcatattaaaaataaagattgatgctgttcaatcaatacataaatcagtgcaaatttgagcaaacatacgataactatgctgaggactccaattggaccacaacttggatccttcatgatttgtaaagtacgtagtttatctccaaaaccacctacccacgcatcggcagtatctgctagcccatctaaatgcaatccgcccgttagccagatccataaagcgaatacgattgccgcaagtaaaagagcgggtaatttaacaaaaatacaggtaacaagaaaaagtatgcccccaataatcagaccaactagaggataaaacagaatagctcgaccattttgttgcgccgttggtattgtttttagctcaataggcagaatagttaaaaattgcaatgctatccaaaaaggtgccatatccaagtctctaactgatctatatctaaaaacaaattgaattatgaagaaataaaaatgggaatagcaatccctattcccattaaagacttcaaaaactgaaaaactattgcatttgatagcactgtttcaatttgatgtagtcatagtaaaaactggttggtgtataaagtgcataattacatgcaggtttaaataaagtttctttttcgttataaagcatttttaccaaagtagagccttggttattttggtaaatatcccattgtaaatttgccgccataggtgaaattacttcaccacgccatgcgcttgtcgagtaattataagtctgacgtagtggtaacggctgcatcatattatgcaaatctaagctagttgctaaaggaataataatttcagcatgggcaaaacgtaaaactgctttataaggttgggctttattcacaacagcatcaacttgttggaacaggtcttgtttaagtccttgggcgatttcactggtgacttgatttgattctgtaaagcttggacctttttcgtaaaaatcattggcatcattaaattcagcataaaattttgcggcttccaaaggcatatatttatcaaaattaataccttttaactcatctttcataccaccagaaattgaatagagttcataaatataagccgctgcatcaactgcgctggcaattgtatttttccccttacctttttctgtaatttgctcacctttaggcggagttactgtaaaggatccggtattgctaaagctataaccagtggtaccgagctttttaatgaagtcagctttaaaaatcgggctgagtaccatttgggcagttttttcagcctgagtatttttagataactcatctaacttttgagctaaatctttattattttcttcaaaatcttgataagcctgacttgcatcatatattttttgttggctaacactcagtggttgagctaagtcttcgtctgcattcaagctatgaaaataaagtttaaaacgatcaacgccaccatcttcaacacttggaacacttccactcgataaattggtataagacaatggaacaattttatctttcagttggggttgttgtttaatgagttcagcagtgaaaaatttagcactatctaccgcacggtctactccagaactttgtaccaatataggcgcctgcgcatttaaaagagttggtaagcgctgtaataatcgatcggcaataccgcggtgttctaaaataccagtcatggtttcatttccatatccgtactgacggatcccttcaacaccataacctaacaaaatattcgctttcatcattgcttctaaatcagcacctaattgctcacctagcggcgttaaggcattttcagctttcgcctgtttccataaattataaagtgctaaatcatatttcagacttgataaacctctcgaaccgtgacgtgccactaactctgtaaaaactggctggaacccagtcggcgcttgttcatagctttttaagtcttgttgaggttggtaaggcgttttcgtttgataatattttgatgggtttgtagatggtgcagtttgagcttcttgatcatcattgttattacaagccgcgagtaataatgatgctgcaagcacagttgttttaaataaaatattcataagccagatgtgtgattaataagaaatgccaatagcttagatactagcaatgacagttctattacacaggctaaaataacattttaaaaataataacttacaagtgtataaaaatataaaactactatcttaacttaaaagttaattgaccatctgtttcagaaaattcgagtgaatataattttccaagctctgccggcattttaagtaagtcatctagaggctgttgtctggctaaacaagccaatagcttaatcacaccgccatgagtaacaactaaagcatgctgtaagttttgcttttgcatatgctccagcaaatcttgaaagcctttaagaacccttgtttgaaactggtctaatgtttctgcgcgaggtggacaatattgacttggtttttgccaaaagtttgccagtaattcgggtgaagtttcataaatttgctgagttgagatgccttcccattcaccaaaatacatttcttttaagtcatgatttacaagtaaggggagttctgctgttttggccagttgctcggcaaaacaaacacatctttttaatgatgaacttacaatgacatcccatggctgatttgaaacttgctcaatggttgcctgcatttgctgccaaccttttgctgttaactcatcatctaaatggccacgtaaggtatggctatactggctttctccatgtctgagcaaatcaatcctaaatttagccaattttatttccgcttacagccgcttgagcgaaggtagccatttggttatgtaaagcgcaagccattttaaccaatgccaaagcagcgccagcaccactaccttcacccaaacgcaaattcatttttaaaattgggtcagcattgagttcttgtaaaatacggcgatgtccatattcagccgattgatgaccaaacaacatccaatcacgcacttgaggattcatccgcacagcacataaagcggctacagaactaataaaaccgtctacaatcacaggtaaacccacttgcgcacagcggatataagcacctgtaattgccgcaatttccaaaccacctacagcacatagtgttttgaagacatcaccaatgacatgtttatgatgaagttcaattgctttttcaattacttcaattttatgtcttaactgatcagcaccaattcctgtacctactccagtcaattgctcggcagtatcatttaataaaaggcatgctaaagcagaggcagaacaggtatttccaatccccatttcacccgcaatataaatatctgctccattcgctttagcagtatctacactttttttccctaactctaaggcagcacgacactcgtcagcattcattgcagcttgtttggcaaaatttgctgtgccggcacgaatacaatgacgctcaacacctgcgtattcgtatgcttcgcctactgtgccacagtcaatcacttgcaaatgagcttgatgatatttagcaagcacactaattgctgcaccacccgtcgtgaagttttgcaacatttgacgggtaacagcttggggatatgcagaaatattttcttcaactacaccatgatcacctgcaaaaattgtaatccatggatggttaacttgtggatgcgcatttgattgtaaactggcaagtgtaattgcaatttgctctaaatcacctaaggcaccagtaggtttggtgagctggagttgatgttgctcagcttgttgttttgcatctaaattaggttgctgtacggattctaaccaccagttcatttttatttctcaccttttaaaatcattggaaaaccagccacacaaaacacaaccttatttgcaatttgccctagagcttgatgtagtctgcctgcttcatcgacaaaccgacgactgatctcaccgagtggcacaacgcctaaacccgtttcattacttactaaaataacttctgactcaagcgtaggtaaaatttttaacagctgctcacattcaaattgttgaatattttgatcttctaaaagtaacaaattggttagccaaagtgttaagcaatccacaagaataatctgattaggtcgatcaattttttgcagagtttttgctaaaaataatggttcttcaaccaaagaccagtgagcaggacgctgattttgatgatgggcaatccggctttgcatttctggatcaagcgcttgcgccgtagccacataagtgacagctaattgcatagatatggccgtttgttcagccaatcggcttttgccagaacgggcaccacctaaaatcaattgcaacatgaatcacctaaaaacaaatgctgatacggatacagctgaccttgtaaaatttgagcttgataatagccaaaggttaaatgctctactttaagatcaaattcagcctgtgtgtattgtacaggtaattgagaaattttttgtaaaatcaaattgctactatagtctttcttatacaaacccaatgtaatgtgcggacagtaatctaaagcggcaatttcattagaaactgtgtctaatttttgccgtatgtgagataagatattttcgatgtcttggacttctacaaataaagcactactaaaactatcaactgatccaatttttaattgaaatggtgcaatatcttcttttcttaaaatttccccttgctgcacaaagccactaaaacaaaagtcatcatcatgaactttattttcatgggtcaagaatccacatataaacagcgtgacatgatattgacggtgattaggttctactagaaattctgaaaaatgcgcacgcaattgatctagataatgaactaatttctgatcattaatttctagataccacaatgcgtaattttgacgcccaaggtgccattcgggataatcccgtataggtgttggcaccatgggtgtggagggttttaacagcacggttttaattcaaaattattcaaattttgtattaaaacatgtttgtctttcaattgttgaggttaattcaataagcaaactcaaacatattgatttgatgtagttttggtattgttcagcttaatgtccaaaggttgtttaccttgttcagaaaacaaatattggataagttgaaccaattcagcttcaagctgtcttctttgagttgtactcaagtctaggttctgaatttgttgctgcagctgttcaacagctttagtctcttcaatttctaaaaattgaatcgcataggcataacctaaagcagcaccttttaataaatttttataaggcaaatcatgacaaatattcacagcaattgatgccatgacacgttcattatgattgagtttgcgtagtggatctctagctacgcgttgacaaggatctttaaatgcatattcacatgagtctagaaaactttgtgacattcgatccagatcttttgcatagttaggtaatacaatagcaagtccctgcttcacttctgcaattaagttctctgcaaatgctttaactaaatgatcacccatggcaacaccaatagattcataacccattaaagatgcataccaagcaagcatcgcatgtacaccattccataaacgatttttaatgagttgaatgtcagtaatttggtcaaccaataccacctgacgcaacttttcaagtaaaggactgcctttctctacatagattggcatatcagtttcactatggaacaagattaaatccatgctttgtaagatatgtcccggctggaaattacggcgcatgttatcaacatagatagaagcctgatttagttgttcttgattcagtttattacagtcttcaatttcgatttggtcttcttgctccacatcttctaaatgctgttcaagaaaattatgcttaatacgaagttgacgatataaattctgattagaaagttttgaaaccatgcgattaactacggtgtcgcaaaagtaatgctcttttaaaatatgctcggttacatcttcatcgttggttaactctagtagagcttctttaagatgcttcataaccaaatatttcgcaccaaccttatttaaaataattagaaaggttaaaggttctatacatgtttcaagttgcgaattaaaacgcgcatataacccttttgcaattatctttgattcaggttcgatcgcttgctcaggcaaacataatgcaatcaaacttgaatgagtatacatctctaacatttgttgctcattgtcagaatcaacaatggtcatattttcaatacgttcatcataagaaaattgcccatagcgaatactataggttccaaacgcatttacagcttcgcggaaaagactatttcgtgttgacgcaattatacgttttggtttcgtataaccatcccaatgcgacaagatctgcgctatataaccaccgccaatagcaccgaaaccatgtattccaacagtaagctgattcagactttgcggaaaaggttcctgcatttctggcatgtccataacagggataaattgatcaagatcggttaaaaagtcatacatctgatcataataaaaatgcgctttttccagcatttcatcatttggttctttaatatcttttaataaaatcgttaaacctttcgatgtatgtgctgaagttaaaccattttccgaatcttcaaacataagacactggttagcgtctaaatgaagttgactagccgcttttaaaaagatttctggatgtggcttcccttgttctacttcatccccacaagtaatgacatcaaaaaatttataaacatttgcattaattaaatattcttcggcaattgctctacggcttgaagtagccacagccattcttaaaccagattttcttaaacgctctagaacttgaaccaaaccttttttaataggcacgccgtgttttcgaatatgttctagttccatctcatcggcacgttttcgaatttccttatatggaacatctactccgtataaacgttgtgcaagcttttccgctgtagtcgcacttaaccccaaacattgcattaaatattcgtgtgaaaactcctgcccaatgagttcttgagatgcctgttgcaatgtttgaaaccgcaaccgttcagtatcaaacattgtcccatccatatcgaagatagctccatgaacaggttttccatgaaaaataagcacgtttttacctcttttttgatcatgttttattcagggtatacaaaaaattgctaaaaaaggcaggatgataataaatgaaacattagtggttattttttaaccaataatataagcaatctgttactgagaagagttaaaaactcaaaaaggttgaacaatatagataattctgaaactgagttttaagcacaaaagtagcaagccttcctcgcgtgctacttttgcttcttctttttatgcgctgatcatgtttatttttcttaggtccatttactgctaaacagacctgcattgtttttattatgtcttgcaggtctacccataccagaaattaactcgctttttgctgtaatttttgttgcgatgcctggtataactcaaaaaatctgtcatagaacttttcacggaaacagtaatacaacattgccgttttttccggcattggaattaagccctgctcttcatagcacatgtcttctactacagccgcataaggcttcactgtatgatcaggttctcctacaattctatttgttggggaattttcaaaaatatagaaattcaataaacgaattgttgggcgcaaaaagccttgaccaaaagcagatttctccccaaatagtaaatgccaacctaaatcattgtcttcacctttataataacgagctaggcgatcacgcttcccttcataaatttcggcataacccacgtcttgaccattgattcctacaatcattaaacgttgatgatcatcagctagcattttttcaaaataaactttgagttctatttcgcttttatttaattgccactgaggaataacgtgtggctcatgcatccagcggtgtaatagtggtatatcttgaggatactgaacctgacgtaatgagtagctaacatcattttcaatatattcaaaataatctgggagcttttgtgaaagcgtaagcattataacggtccttgctatgacataacctataattgataatgataatcatttttatttaagatgcaagcttatttttactattttttttattgcataaattatggacaaaaaattcagctttcccctgctaatatttaaggtaccaactcaacaatcgagaaaataattgcaacgacgattaccattaaccaaataggaataaaatattttctaaaaaaataaaaaacaataatttgcaaaaagaaagcggttgtgatgatcgcaaaaaaccatgataagactcctactgagcttccttcaaaggagcaattcaaaaacaatgaactaagcaaaaataatatggttgttccatataaaattcgtctagatgtacttttaagccagctatattgaagctttttctgaccaaattggctgagcatacatgcttgcattatggcagcaatagcccaaaataatgatgcaaagctcatttggcctctcctaacgtaataaatttggtttggtagaagcgtagtactactaaatagaatagcccgagcagtatgagcgccagatcaacaccgacaagagaccaatgcacagactttagactatttaataaagaggcttctggcaccagaacgacactaataactggaataaggaataaaacagcagccgtaatatatagcatgatgattattcccttccttattgagcagctaaagctaatcaataagcttaatagccatgctatataaaatgctgaaacctcgtatagttccctcggctcaaatgaagcaggtataatccgattaaccattaaataaaaggctgaggcaaaaggcagccctaagaaagtaaaaaagttcaaatgtcttactaatctatatccaaatttcttttgttctttgatgcgctttgtttgccatagtaatgcgcctgcaaccaacatgacacatcctattattcctaaacaagccaaaataaaacgcatccagatagaagcaaagtaacctaaatgaatcccataacttgatgaacctaattgtgcaattgcacttaaatttcgtggctgattgagtcgttcagccgtatttgttgcaaaaatatattgaggagtatttaaggtaataatatttttatagttatagtcaaatgtaatcatgccatcggctgtattaggcttttgaacttcaaatttatctaaaatagctccagattctgttcgcttaggcatttgtgccatgaattgattaaaaggttgcatcgcttctgttaaggaaggttctcgaggttttgccacctcggtaaactgcatttcattatagaacttaggtataccagctttaccatattgttccgataatccccacggtaaaactagataaaataaaatcaacagtccagtaaaggccatcaccaaataaaaaggaaaagtgataactcctgttatgtgatgaagatctaataaagaacgctgtcctttaaaagccctaaaggtaaaaaactctttaataattttcttatgcgtaatcacacctgtgattaaactaattaatagaattaaggcaacaacagctacaactaagctaccgaacgtgcttggcaaaggataaagcgtgtaatgtagtttgaaaaagaaatctccacccaaagtcttccgtacaggtcctaatagctctccggtattagggttttgtagctcttgatgtttcccctctttatcctgccattgaagtaggttcacaggcatccgctcattggctactgtgactcgccatcttttggcatttggtgcatgttggttgagatagttaaacgcagtttgcgcagaatgttgtgcagaagggactgtttgaatatggctgattgcttctggctgtgcccaaacattaatttccgttcgaaaataagcaatagagcccgtaaaaaaaatgaaaaagataacccaaagaacaataattccaaaccaactatgtagtattgcctgaatttgacgaaaattcatttaagccactccccatttagctaatagccaatagctcactaataacactacgcctaagctattgatcatccaaaaccatagttttgataaaatggaactcgtaaagacaatataaaaaataaaaaagataaaactgataaataccgaaaaataaacattctctgctttagcaaaaggtaaccatttagccaaaacaaggctgagccatgaactgtagcaataagcggctaaacagataaaaaagatcctgctatacgtaaaattaaaattttcttgtttttttagatgactcatttaaatggccttaaaaatttaaatatgccagatttgattgaaagaaatacctgctctatacaggtatctctttcgttagttgcattaatagttaaaagtataacttaaaccataagtacggccttctgcagggattgctaacaacggattagcattagagacggctgcttgctgagcaaatactgttcgatactgacggttccacacattataaacaccaaaatctacacgacctttccaagccgggaaatgtgctaatacatccatagtggtataacctttgatttgcgcagcactattcgcatcattctttacagcgttttggaaagcttcatcttgagttgttgcaaatgctgctaattcacggtcatctttataagctttatttgttcctttaatagcttgcatctgaacacgaacaccatacccttcattattatcccattcagcaaaaagggttcctttcactggagcaaccgtaaatgagtttaattcatgccatttattcgccacgtctttatactgaccacgggtatatcctaaagtgccaccgaccttataattttccataaatggataactaatagttgcttccgccccgtatactctttgatctgtatctacaacctttgctgcacgattgttgaattggacagttttatccgaagtattgtaaaaaccagtcaatcccagatttaggccatcatcctgattcaaacgccaacctagttcataactatttactgtaattggctgtagatttgctgttgaaacggtataagtagaaacatcgcgcaacatacgttgtacgtcagggaaactaaagccctgagagaaattagcatatacctgctgtgcatctgtaagtttataaactgcacctaaattaaataacggcttatcatcatgtgttgatcctgccggaaccattgttgtctctcggctaggaatataagcatcggtatccgcttgaatatattggtaacgaatacctgcttgcaagttcaatttatccgtaactgcataatcgctttgaacaaatgctccaatattttgaatttcagtatttggcccataacctttacgttggcctgttggcgtatacactaaataaggatattgagttgctaaaatatcaacaaattgcttatctttttcccaatcataatcaaggccataggttattttcatatcccgattggcgatattaagatcggtttgcatagttgaacgtaatccagctacttcaatttctgattgagactggtttacaaaagtcacggatttatttgataggccatatgggaagaaacgtgatttttcatttctataatatgcttcaacatttagtatttggcctaaaaagtcttgattttgatactgtgaattaacagcataacgctcggtaaataatggattactaagctttaaacctttaattgccttataagttggcgttgtagcatcattactcttagaggttgtcggtaaataagagtaatccggtccgtagtcagtatcctgcttatctttatagtactgggcaccaaagctcaatgtctgagtatcatttaaattgaaatttaaacgcccatttacatcgatagtatcagtgtccatcgtactaccttgccaagggcttaaggaaattctatcgccatttccatcaaattgagaccctctacttgtaaaattagctcctaagaaaccatccatattgcctttattaaatgagacagattgtccgacttcataagctaagccgtcactacggaatgtatctgaagatgtaatgcctacttttgtttcaaagctaagtggtttagatgtatctgctcttttagtaataatattaataataccgccagtagcacctgacccataaatactagtcgcacccgaaattacttcaatgcgttcaatcataccaggactaatactatttaattgacgcgaaacatcgcgagaacctgtttgcgaaacgccatcgatcatgactaatacgtttcgtccacgcattgtctgaccataattacttgttgttccactacttgatgcaagagatggtacaagttgtgcaagaatgtcggcaactttacgacccgccgtagcttgctggataatttgtttctgatcaatagattgaactgtacctgcaatctctgcaatattttttggtgtacgagtcgcagttactacaatcttttgcaattgggttactggtttttgtgttgcattttcgcttacctcagccgtttgagttacggtttctgcataagcctgctgtgcaaaaatagccgatatggcaagacaacaaggtgtcatcttaaaaagtacttgttttgaacgtatgtgattacgtgctttaaccccaatcttattgtttacattcattttttccatttctccctagcccaaatgttactcaacgatttttcaagaggcacgacatcatactaaatacgaacattaatgagaatgatttttattaaaaataatagtcatctatgttattttttaaaaagaattcatttttcttattttgttcattttgctcaagcatttgaaattcttttaaatattgctgtgccacatccatttttattataaatattccatctgcatcccctataatcagatctccagtttgtacgatggtatgattaatatgaatcttggcatctatttcaacgagactttccccttcattgcgagtggttaaacaactggttgtatgagcaaatataggaagtttgagttgaagtaaagcctgccgatctgtaatagctcctaagaccacaacgccagccagaccacagtgtatagcggctacgctcctttgctctccccagcaagcacgttgtagatcatatcttgcatcaataacgagaacttcatttggttgacaactcatcaagacttgtcttaaaccactcgcattgatcgattcaatccgaactgtacgtacaatccccaccaccttatcttcaggtcttaaggggaatacctgtgcaatatatccctgatcaagtacatgaccaatagtagaggttgctatttctttatatgctgtaacaagtgctttagaagtatcaatttgattcatctttaaattttccgatttcttttaaacgtaagggacaattacggcataaggtctgctcagcctcttcgagctgaaaatagaaacagcatttttgtctcataaaagtattaaattctggatgccatccattccataaacgcacaaatggattttcagttaaataaaaactttcggcagcttttgacttaaagaattgtttttgctgttctaaccgagactgtatatccggatttagattttgatttgtaaaagaatgataaaactgtactactcgaacagctacattttcccagagtaatacataaggtacgcgacctattttcgctaactgcttaaataacagattaagttgttctatcaagtcattaaactcttgcaaatgtataatctgaacagaataaaaacttgtttggtttaactgtaaagtcctatcccaataccattgttccggcaagtctataactaatgctgaactatcccattttacaaatggcaaaacagccacatggcaatataaaaaaggtaagatccaacttgtacaccaatatttgacaaacaatgaggtcgcacaagttagatttttagcatgaatacgtgttgcaaaatcctgtaacacctgtcgacatacatcatcattcaacagacaatctaaggttgttgaactttcaggtagtatttgaacatttaatttcagacgctgttgcaatataggcagagttgcgcacttctctgcctgtattttaaaagacgtattcatcgtcagatatcactaacaatttaaggcataccaaagtgggtttcgggttttcccaattcccgttggcatactaccaatccgtgtatcttgttctagcaaaggtcgaagtaactgcttatatggccattcaggcacttcaaatagtaaatgttggagctgggtcaaaatctctggctggaagtttagattttgaataacttgctgtaacgcatgagcaagtacagaccatagatccttaacttcaatttgataatgactcgctaaattatcaacaatacaccctagattaacctgaatacctaaagtttgaatataaaataacagagcctctaccgattcatgataaagcgtatttctaaaatcatggggactcaaataattaggatctttcaatccgctttgctctacccaaggtaaataaatacgtaatgaatcatgatcacggaacatcaatccatcaaattcgccatttttcaacacaagacatatgttttgcccatgaatttcacccataagccctaagcggaataatcgcaaatttacatcaaagaaacatgtacacagtttctcaaactcgataagtatctgcttggagtttatgtccttgtgttgaagctgcaaaatataatcaaaaatggcaggctcacccataattgtatgtccaagacttgccattggtataagttgataaggttcttgcaataattcagctggaatatgacggcgctgagctgccaaatgggtaggtttctctacaaataaccactcattgtctgctgtccgatcattttgcttctcgggtaaatatgaccaccattgtgtttcttcacaaagccataatttttgttttaagacagcatcttttgccttggcttgctgtaataatttctgatttttttcaccattaatcattttcacaataggcaaaaatcttaatgaaccaagagctttaatccctatcggtaattttagactttcttctaaaacattttttgataagaggctacgcatagacgcactggcatacattcctttagagataaaattcaaaggatgacaaacaccgtcggcaatatcatccgcatagaacttgggaaataaatgctcaaattgccaaggatgaattggcattgcaatgtgggtttcatttaacccacgttgaaacatttcctgttttaattgatatcgctcagcacgaggaataaaaatttcgcttggctgttgtttgaaaatattttctaccccttcaccaaacatcattttatccttatgtacagccacccaatgaatagataattcttgagcaaattccggacaatattgcatatactcttgctgactgagaccttcttttaatttggctaaaggatgatatgggcggtcccgataacctgcatattgctctaaaatgcggaatctatgtgccaagctttgattcaataaatcatgtgcatttacccgatgttgttgtaataaatgatattgctttaaacatttttgcagctgctcataaaaggcttgaactttatcagtgctacactgattaaaaagacctatcgcttgaataaactcaaaaagttctattatcccaatcacattgatctgaacatgatcatttgtgcgttccaatagaaaaacttctgtttcattagcaaacttccaggcttgagtaatacctttttgtaccgcaaacatgaccaagccttgccgactctcttcgtgtaatagcacaaaagaaaattgttcagacgtgtttttaaatacttcttgaagatttttgccatgttgatttagcgcagtttgggcagtcgcaaaatcaaaaataaactgttcaggaataatcgtttcaaccagaaggctattgataaaatcctgtaagattccttggtccattacttgataaacgggctgaagtgcattcatagataaatctcacttcacctgcaatttaaaaggagctaacgggttatcgacaaatttaatttgtatgctacgatcgccaaataaacgccgtttagttaatgactcaatgcgcaatttttcggcaaaaacatcaaataattggtaacgtgaagcatgctctggatgttgctgctggtaattttggatgacttccgcagcccattgccagaaatttttttctggaagatcaaagttttgatttaaaaatattgcaatatcggttaaagcgacaaaaaacagacaggcacagctaaaatcacgaataccatttaaatcatctgtcaaaataaatgacatactgttggtttttgcatgctcaggcggcaactgatcgagttcaggagccaattcagggtgtgctaaatgtgctggactatagcgcacaccatcatggaagtcctttaaaagaactcgcgttggccaaccttgtttatgtacaagaataatattttggccatgtgattcagttgcaattccctccgcaaaaagtaaatgaatcaaaggagtaatcacaactttcaaaagttgacgtgtccatgattcaacaccatattgctgtaaccatggtgcaattaatgcttgcccatctttttggatatgactcacgccatttaacggtattgcatcttcaccttcacgtaaatattgatgcacactctcacgccatagacatccaattgtaccataggcctgttgagcatgtgattttggcaatttagtaaaatccacgcttaaaccatacacttcacgtaatacagcaaaatcaagctcttgggcggttttgctctgtttaattaagcgttgcaaccagtctgtaataattggcccattcattactgtatgtttagccagaacacgtgagcttgatgtattagttagactcatcgacagtttgatataaggcttttccggatgctgcaagttagtcatagtgcgtagagattgttgggctaaatagcgatcctgactttgccctaaataaacaattttgccatttagaatttcttcagcaaaaatagaaattaaatggttttcccattgccaaggatgaaccggaatccaaatatattcatcagccttcaaatcacgatctgagagatgttgcaggaatagctcttggtcttgtgaattcaattgctccttaaaaaataaatctggctctatatcttctgaatgtttttttgcaacaatgtcctgatgcacagccaaccagaccaaggcgattggttgggcgaactccacaccatagcgtacattgtcttgtaaactaaaacctacacgtgacttgtaacacggatgatatggatgaccatccattaaatatgattctaaaatatcatatggatattgaattgccggcaaagcatagtgatcaaaacatgcttgagactgtaaatcatgaataaatgttcgttttaattcaaaaataaaatcttcaacttttgctgcatcggttatggttctaagaatttcatcaataactaaatttaaagtagcaatctgataatgaccgttttcatcttgacgaaatacatcctgattacgggcaaggcgtaccagtttgtaactatattgtctttgccctgcagcgacataacgaatggtttggcgctgactattttgtacttctataataaaattttttccatcatattctgaatgaataatatcttcaaaaattaaagcttgaagtaattgcttaataacacgttgctcaacatattttgcctgatccgaatttggatgttgccaagcctgtaaagcattttgaatcacatgtgtatttgataaaactggatgtaattgtcccatttttattaatcctatttctttaattggtcgattctgtactgttcaggaaaacgccatgcgaaaggcaaagtgcaaagtataagaattgcacaacacacaaagatttcctgcatagtgtgaaatgatgtaaatattgcttgagtatttaacggcaatgattgttgtcttagctgaagatataacgcggcaataacgactgccactgctgcaaaaatacgtcggaataaattatttagagcggccgcttgagtaactagatgctgttgctgctggcgtaagctgttcaaacctgccgtagtcgatggcatataagaaagtcccattcctaagccatgtaatatcatacaaaacacaatgaaccagacattttgtataggtgcccaagcaagcaaaagaaaagaagccacagtaatcattagtccaagagacatgatttttgcagcaccgtaacgatctagatattttcctgcaggttgactacaaataccggtaactactgcactgctcattagcgcaaaaccagtccaaagcgggcttaactttagaaggtgctgtatccatagtggaatgagcaacatgccaataaataagcctactgtttgtgccacacaaatgactaagctgtagcggaaccccttcgtagcaaacaaagctggctcgattaatggcatagacttattcttttgtacaaaaataaatcttataaaaagcagcatacttagaactaaaagcgcaccatatagaggttgaagtaagtcctgaatttgatggatttggctcagtgtcccaagtaataaaactatgcttgaaccgagaaaaaagaatcctgcccagtcaaactcttgcttattgtcccattgctctttaggtagaaaaacatagcctaaaattaatgccagacaagcaacaggtaaattgataaaaaataaggccttccaattaagccataccaaaaccagtgctccgagcataggcccaactgctaaggttagcatgatcatggcaccccataatcctgttgtacttccccgttgttcactgggcgtaactgaaaaaattagtccaagagataatggaatcattaatccgctacaaaagccttgcagagctctagcaatcaacaccgattcaaactgattaaataaaccacctgctgtagaagccaaagcaaatcccaataaggcaattaaataaattgaccgcttaccaaaacgctggcttaggaacccagctaaaggcaaactgatactcattgctaataaaaaggcaacaactacccaacttgcccatacctcacctacctgaaaataggacattaaatgaggtattgcagggttgaaactactgttatttaaactaaccgtacctgtaccaagcataaccgtcagaagtacgtagcgttgtaaactttgctcatgaggttgagccgcggacacagaagaacgttccatacacatatcctctgttcagcttattcaatatgctcagataatttacttcgtgcatacgctcccaaagcagaatgatgcattggccctgatttatttaaaggtcttgaaaactcggttatttttgaggctgcaatattgcgaacagaaacttcttcttgcgctggtacattcactccaaattgttggaatgactgagaatgatcaagtttgaataactcttcaccaaccaattgatttgcaattgtggctgccctatatgctcctaagcctaaatcaggcgtacctacgccgtagtgataaacttccatattttgaataaatatagatccctcaccttgataattgactttaaagtttgaagccacctgccaatggtcggcctgatctcgtatgatcaaagattgtaaattttgtagaaacttagggtttggataacgataacccgtagctgcaataacacaatcagcctccagaatataattcttattttgctgacggtgttcaaaacacaactttgttttctggttttctaagagctctgcatattgcagttgatgatgtccagccaacgtaacatctgtaggcattccaccgatactacgatgatataaacgctcataaatatcatgtatcgttttactgctaatacctttatataaatttgcttgttgcgctggtaactctgcctttaaacctgatggtaaatggtaaaagtaatgcatgtaatccggactaaaatgttctaaaccgaatggtgtattttccattggaaagaaaccagcagaacgggttaaccaataaagatgaaagtctggtgtagttcgaccattcatatactgacgatcaaatagatctaaaaaaatctctgctgcggactgtccagaaccaattaaaactacatttcctgataacttctgggagctgtactgtaaatattctgatgaatgcagacaggttcctgattttgagtaaatcttttgtaagctttctggtaaatgtggagttgtacccactcccaataccaattgtcgagtacgataatgttggtggtgcccattacacactacctccacatcaaatccacctttaatcggtttaatatccagcacatggctactaaactcaatatggttaagttgttctacaacccattgacaataatgattatattcctgacgcggtatatacaaattttctctaaaatagaatttatataaacgttgatggtgttttaaataatttaaaaaactaaaagggctggttggctcaaccatactaaccaaatcagccataaaaggaacttgtaacatcgcattgggcaattgcataccagcatgccagtcaaatttctcacgctgatcaaaaaagcgatattgcagctcgcttttatcatgtaacagactagccagacttaaattaaatggccccagtccaattccaataaaatcaagcatagctcacatccttctgttcaacgtacagtggatttggtagctgcacatacacagactgatgttctaatggtgcaataagctcatctaattcatgtaaacgtgtaagtaaattgcctttatacggtaaagaatcgttaaacaataaaccctgtaataatgtgctatctggatattgctctaataattgaagtaaattttgttgcaaatggattaacagttcatcttcagaaatatagccagttgctccaattgcattaatcaaaccaaataaagtgttgccaaagaaataataactaaagcgttcatccacaaaatctttaggaccaaccgcatgagctttttctagtaaatctggtaatgcttctacaatttcagttgcaaactcttcaatataataaaagccttggttgtcacgtaaccagagatttttcggtaaaccatcttctagctcaagcaatacattttgttgatgcgattcaaaagccataccgtatttatgataaacatacattaacggagccaagccaatcttcaagaaatgatcaaaccaatccaaagcaatttctttaaaattcgtttgttgatttttctgagcaatttggtcaaataaagcattaaaacgatttaactctttatttggatggtcttgacataaagatgcaatacaagtgacttgttgctgtactgcaaatggttgatcacggaaaatacaaattgtctcgttaataatctcgccgtctatttgcagagctatccaggctggatcattaactgctttcaatgttgggcattgttttaatatttttttacctaaatcactgtgccataaacgataagaaatttcgccacgatgacactcttttgccaaattcactcgaattgaattagtgatcatgactgatagtgaagttttaaccatccaaggggcgttaaaacttgccaaggtccgaattgatgtagtcggtgaaaattgccatccacgtaaaccgatatcaattaactgtcctgtttgttttaattgctcaaaccaaggtttaccttgtaaataacgagcttgccaaggatgtagtggcaataatttaaattcaacatgagtctttaacaggtttaaatcgctttcggacaaataccaacggattgcgtctttaacttgatctgaaattggctgctcagttgcacaaccttcagcaatataattctgatgaacaagccaataatataactgagtttttccagcatgttcaggtgaaaacttcaaccaatcttcatgaacaaaaccattccggcttttaggcgctgggtgcatactatgacccaaaattaatgcctgttcgctttcaataaaattctgtccagcctttactaaatcatcgaaatcattatggcgttgttttaagaattgtagtagcgcgtcccggctttgtatccatttctctaacaatgaagcagcatctaatttgaattgagattcaataaccaactcttcaagtaaaagactaacaatggttcctgcactgaatttttgccattgaccatcaatacacattttcggtaaagcagcgagacgatggcgtcctacacgacttacataagataaaggtacagagcattctgcttgtatagaaggaagaggaagagttaacagcgtcaaaccagagctaaacgcttgttgagttgaactttgttggtcaaaagaaagtaaatatcctttgccagtctcttgcatataagcgttgacgaaattttgtatcgccaatcggttggcaagttcttgcatctgactacatcctattcagaatcttaagcttttgttttaaaaaatttctttttaacaatttgttaaaaacaactgcttaatcatatttagtttatgatttttctactcagccaatgtaaggctaagaataatattaatgataattattatcatttcattattcaacatactgaataatttttatttttttaataactttttgaaattaaatatgtttattctaagagtgactacttaatgtaaatttcttcactaaatttaacaatagtattaaatgataatattctcatttacaataggttttcattataaaacccgacttgagccaacccactcctgcttaaattaataagtagtcctcttttcataaatttaatcaagtacgtctacaaattgcgccgttaatatttgtgctaaatctttaggatttacaccaatatctaaccctctcttaccaccacttacataaattttgctgagctcttgcgcagaggcatcaattactgtcttcaaacgtttcttttggcctaaaggactaattccgcccactaagtaccctgttaaccgttcggcatctttaggatttgccatctgtagttttttacaccctactgccgtagctactttttttaaattgagttgatggttaactggtataaccgcaacaaaataatttttctcataggtaaccagaagtgttttaaacacctcatttacattaaggtttaatttttccgcagcttctaagccaaaacttttagcatttgcgtcatgttcatactcatggatagaaaattcgattttgttactttttaacagtctacatgcaggagtcataggagtttaaattttaatgaaatgatattgattatatttattttaagaaaagtttaaaatttgcttaggctatttacatcatttacatgaaaaatcaaacctacaccgaacaaaaaacaatctaaacttgatattgagtagatgactccaatatatttagttgagatttaaagtctgaactggcgaatttatgagttacaaacacaataatctgatggcaatgcgtcaccgtttttgggatgagtcttcagatcatgtattaaatgaaaagcaatttttacagcagaccttaatcgaacaaggcatttttaataatgcgacttttgatgatgttaagtactttttctatacactgcctagcatcgttattgtaaaggctcatgcgcttggttttatgcatgattccgtcaagcaaatggttattcaacatattcaagctaatcgtatgcatttaatgcaaaaggctgaattgaaaattcagtttaaaatgtaattttacggttagcatctgatacgacgttttatagtggtttatttttctgagtggtggatattttaattttctctctaacgcttaggctatttttagaaaattaaaatctaaaatgagactttcaactcaccattcagtctgagggaactattttaatacgttcaaaacatgtaatattcgttacaattttagatcaccagcgtttggctgcatgatgcgcataggattctattttcatgtcaaatcagaacgataagcttaagagtttaaaaacttcttccatggatcgacgcttatcaatcgcgaaagcttctttactggcaggaacacgttgggctactgcaagtgcctcttccctcttttctagtgaagaagaaaaagagaagaagcgtaaaaaggcaatgagcgagcaagctaattatcttgtttctgaaattggcaaactaaaaggttctattgtcaagattggccaaatgatggcgctttatggtgaacattttttacctgaagaaattactcaagctttaaataccttaaataaccaaactgttgctttagactggccagcaattaaacctcatttacaagaacaattaggttctaagttaaatgatctaacaattgaccatgagcctatcggtacggcttctctggcacaagttcatcgcgcaacacgtaagtcagacggtttagagttagttttaaaaattcaataccctggtgttgcgaatgcaattgactccgatatgagcctgtttaaaaacatgcttaagcttacacgtatggtccctcaaactcgtgagtttgatcagtggttcgatgaagtacgtgaaatgatgcatcgtgaagtcaattatcacgtagaggcagccacaacacgtcgctttgctgagcgtttaaaagatgatgagcgctatatcgtccctacaattgtagatgaatactgtaccgatcaagtcttatgtatgacctttgaacgtggcgtgccaattaatagtccagtcatgctttcccttcctcaagaacgtcgcaatcaactcggtgaagcttcactagagattgcagttcgtgagatttttgaatggggtgaaatgcaaactgaccctaactttggtaactaccttgttcgtttaggtaatggccaagacattcaggataaaattgtactattagactttggtgcgatccgtcagttcgatgaacatttactctcagttgcacgcaatcttatacaagcgggttatcagcatgataaacatgcgatggttcaagcaatgactggatatgagtttttcgatgcaatgcctgaaagtattaaacccggcatggccgatgtctttttacttgcgacagaagcattcagtacccctgcaaataatccagatatgccagctgggctgatggatgaacatgaacgttatgactggaaaaagagccagttacatagtcgtgttatgcagcaagcaagcaaatcaatggcgtctcgatatttctcggttcctccaaaagaatttatgtttattagccgtaagtttattggcgcatatacatttatgactgttattgatgccaaaacaaatgtacgacgtatgattcgtaactttgcttaatattattaagactagaatgactccgtgtcattctagtcaatccaatcaaaatagttctttttaaaaatttattttattttttgaaatcagaaacataaaccaaaacctattttgcttttaccatttatctactcattttttgaatgtcagcaacgacatagttttttcttatacagcgtgtcagcataaaacaataacaatgtgttaggacaccataatcatgacaaatatgatcaataaagcccaagggttgggtttatcgctgatcacaaaactagctggaagcgatgtacttgatcaactcaaactacgtaaatttcttgaaaggtctctttaccaaggttcaaaagctggttttagagcattaagtcagactcagaaagcatttaaacctaagcaaattccccaacaacgcctgcgtcaacagaagaaaaacctatttgatttaagcctaactgaagaacaacaaatgacttcagaggcaatgtctcaatttgctcaagaagttttattgggattagctcatgatgctgatcagacagctcaatttccagaaagcctttggcaatatgtagaagatttaggattaaactattacgctcttccagaagcactaggtggtgtcgccgctgaacaaaatattgtaagtaacttattgattgctgaaaaactagctgaaggtgattttagtcttacagcagggctcttaagtacgtttagtgttattaataccattacacgttggggttctactgaagttcagtcaatgtatttaccttgctttgcagaagactccgacattaccgccactttcgctgtacaagaagctactccagcatttaacccttatgttttaaaaacaaaagcttctcttgaaaatgatcaatattttatagagggtgaaaaaacattagtcattttaggagatttggctgatgtgttcttggtgagtgcggactttaatggcaagccggatgtatttgtagtacaagctggcgataccatttctattaaaagtacccctgctatgggcctcaaagcaacagagacagctactttaaaattcagccatacacccgctctacgactaggtgcaacagattttgattacaccgcctttttagatttaggcaacttaatgtggtgtgcaatggcagtaggaacctgtgaagctgtaaaagcatattgtattaaatatgccaatgagcgaacggctttcggagaaccaatttcacatcgtcaaagtgtcgcattcatgattgcagatatggcaattgaaattgatgctatgcgcatgctaattctaaatgctgcaagtcttgccgaagcaggtaaaccattccatcgtgaagcatatttagctcgcattctttgcgcagaaaaatccatgaaaataggaacagatggcgtacaaattttaggtggtcatgggtttacaaaagaacaccctgttgaacgttggtatcgtgatttacgtgcaaccgcaattttacattctggcctacatgcttaagatcaatcagaggatattttcatgaatttacaaaatcccaaaaaattcaaaatgatgattgatcaggcacatgatgttgcgatcaatgttttacgccctatttcccgtaaatacgataaagcagaacatgcttatccgaaagagctggatatgcttgcttcactcattgatggcatgaatgaaggtggtgaaggaattaatgcaggggctgccggcgcaggaaaacgtggtgaaactgataatgaaggaatccgtaatggaaccaacatgtcaacagcgttaggcatcattgaaatgtgttatggcgatactgggctattactcagcatgccacgtcaaggtttaggaaactctgcaattgccgcggtcgcaaatgatgagcaactagaacgttttaaaggtacttgggcagctatggccattaccgagccgggttgtggttctgattctgctgcgatccgtactacggcaactaaagatggcaatgactatattttaaatggtgaaaagattttcgtaacttctggtgaacgtgcggactcggtagttgtatgggctacacttgaccgaaaacttggacgtgcagcaatcaagtcattcgtagtgcctaagggtacacccggaatgaaggttgaacgacttgaacataagttaggtatcaaagcttctgatacagccgttattagttttactgactgtcgtgttccggctgaaaacttgctcggtaaccctgaaattgatgttgcaaaaggttttgccggtgtaatggaaacctttgataatacacgtccattagtcgcagcaatggcaattggctgtgccaaggcttctttagagcgtattaaagaaatttttaaagaccagttagaccctaattactcgactccatatttgcaaacttccaaccttgctgcacaaatttaccgaatggaagccgaatgggaagctgcacggttacttatgctgaaagccacctggatggcagacaacaaaaaaccaaactcaaaagaagcttccatcgctaaagcaaaagcaggtcgtgtaggcaatgaaatcactttgaagtgtgtcgagttagcagcaagtgttggctataacgaagatgaactacttgagaagtgggcacgtgattcaaaaattcttgatatttttgaaggtactcaacaaatccagcaacttattattgctcgacgtgagcttggaaaatcttcaagtgaactaaaatagaaatattgcaagggagttttttaacttccttgctttttagcactatgatttatcggcaaaaataaaaccctctaatcacatgattagagggttcggtatttcaggaatatattttttaattattcagcctgtgtagcttctaaggacttatcgactacaccaaattttttgaagatttttgcacgacgttttggtgaaatatttgctttgtttaaatcccctttgtagtgatcaaatacacgcttatccatcattttaaaccaccatgaaggaatcattgctggtagtagcatacttgcatagccgcttggcaactctggtgcttcatcaaaatgacgtaacgcttggaatggacgagttggataagcatgatgatctgagtgacgctgtaactgatataagaataagttggtcactacattgttattattccagctatgctctggcattgtacgttcatattgaccattttcttttttctgacgcaataagccataatgttcaatatagttaataatttcgaatagactaatcccgtaaaatgcttgtgttgctaaataaggaatcgtacctttaccaaaaattcctaccatagaagcatggaaagcagcactcataccccagccttgcagcaattcattatcgagtgaccaaaactctttacctttacgttttaaacgatttttctcaatttcaattgctgatttaaaagaaccgataacagtacgtggccaaaattcatagaatgtttcacccatacgtgaagatgccggatcttcaggagtagctgcacgcttatgatggccatatggatgctcaatacggaaatggttgtaacctgtaggcactaaagcaagatgagataaaatatggtctatacgatcatgtttatgacttaattcatgggctgtattaatcgcaataccattaatggcacccatggaaataccaagcaaaattttgtcaataaatgaagtatctttaaggcttgttaaataacatgcataaatatttgccgcatactgtaatggaataaaactttttaccaaacgcgaataatatggatctttctcaagaagtttaatttcttcatcggttggattacgcgcatctttaccaataattgtatcaattgcaggaatcacaacgtgtaataaaagtgggccacctaaagcaaatactttctttaatgggcgtggaccaaaatggtatccagctaaaatacctaaaccaattacaggtagagccggactaatcatccataaatagcgcttacgatctatctcacgcatagacgctggcactggcataagttcttgctgaacatttactggtgcattcatagtcatatttcctttttctatatatctatatagttaaagaaatactattttcttaacagttgtaaccgtccaaaaaacctatttcaaagtctttggcattttcttccacttttttgtcctaaaaacacatgttgatctattcttatagctcactataattttattaaaataatgattgatcacgtaaacatggatgcactaagtaaattttttgatgatatccacttaaataagtctgaatatatttatataaaagcacaaggtgaatgggcttttaaaacacaagatcaatctgctttactggcttatatcgttttaacgggttctgtatatatccaattaaatgtgtcagagaaaataacagcaagagctggagatattattttaattccttctggaaaagcgcatcatgctacagactcaaaagctactgcgagtaaacttgtagatccagtcgatattaccccattatttaatggacatcgccacgatccaattgagttaggctcatcaacatctgaaaataccctattactctgcttgcgctgtcaagtcgatacttatatggcagggccacttattaatgcattaccctctattatgcatattcaacatgagaaccaagccactcctcctgaatggttgcaaataggtctctactttttagcggtcgaaacacaaaaaatccaaccaggtcatgacaaaattattgatcacttagtcagtattcttttaattgaatgtattcgtgatcatattcaacaaatgtcagatcaacaaaattggttaggtgccctcacacatcctgaattaagtaatgctttatccgcaattcatagtcaacctgaaataagctggactgttgaatcattagctgaacaatgctgcatgtcacgatctaagtttgccaatctttttaatagtattattggtgaaccacctcttacttatttacagcattatcgcttccgcttagctagccaatatctacgcacaagtaatttatcaatacaacaaatttcaaataaagtgggctattcttccgaaaccgcatttagtcaggcatttaaaagagtatttgatttatcacctaaacaatatagacaaaattatattggtactaatctcgatgaataataaaaaaagcgccgaagcgctttttttattacatagattttatttgattttagcgtgtgactttaagtattcgctgtaatcttcaagtatctgttgaccacgagattggcggtaaagctgttttaattgttgcaactgatcagcaggcatagcgttaacagcagctgaatttacattagaaacagccacaaccactaactcatttggtaagttcgcgatagttacagaccacatacctggttttggcgcaggaacactaaatgctgcacgctcaattgcacgttttaaaccttgtgaacgagtaaatacacccgctgattcaaaagcaactttatttttcgcgacaacttgttcagctggctgagttttgaattctgtcagcattgtagcgattttcgcttgagctgctttacgtgctttctcatcaattactttagcttttacttcattcattgcttgggcaagtggtttaacaccagccgcatgatagtcacgtactttaacccaaacagtatctccgttcgctaattgaatattagatgaagcattacgatcgccatttttcacatcatcattaaacaatttaatttttacgttaggatcacttaaatatggattttgagtagctaaagttacaccatttaatgattcgatttttgtacctttaacctgctgtacaacagcatctaaagaatcattaccaacaatcgtttcgttcaaactatttacggtatctgaataaacagaagcaactttatacttttcaacttctgcaattaaacgtggtttctcagcttcaaatgaaggaatttggttcgcctgagtctccgcttcaataatatgatagccatattgtgtttttactggctgagaaatttgaccatttttcaagcttagaacagttttatcaaatgcatcagaaaaaacaccaggtgcatatgcttcaactaatccacctttcgttttagaagttggatcttcagagaactgagctgctgcttgagcaaatgaaagtccaccctgaatttttgcatatacatctttagcaagtttttgagctgcggcatcatcacgagcgtctgtcgtaataaggatatgtttcactatgcgtttagcatctttttgctgagtttctacaaactttgcataagcttgtttaagctcggcatctgttgctggagctggcttagccattaaagacggagataaaacgacataatctacatcaacagaagcaggctgtttaaactcattctgatgtttgttgtagtaatcagtagcctcttggtccgatgcagttaaaccagctttataagggtctaacttaatactagccaaatgcaatgtacgctgttcagtttgcaaattcgcaatttgcattaaatcaactttactcactaaagaataatctgcaaaagttgaagtcaacatttttaaagcgtgatcttgacgtaagctagcaattaaaccttcacttgtcatgccaatcgaacgcaaataattttcatataatttttgtgaaaactggccattttcttgcaaacttggctgctgagctaacatttgctcgatttgagcattgcttaaagaaatacctaatttttcagcttgttgaatgagcaaattacgggataccaatatatcaagagctttggcttgaattaccggtaaattaagtaaactttcatcaccctttacagcagctaaatattgttctttatacctttgcgttaaagtttcaaggtctttttttgatatgtcctgtccatttacagtttttgcgacatctgccttgtttcccctattaaaatatccttcaatacctacaagcgctaaaggggtcaaaaacaaaactaaaaggactttgccgagccaacccttaatgactgtacgaaacgattccataagtattccaatattttatttcgaggagaattttaactgaaaaaccacaatgaatgaatgagcaatattggtcaattcagatttttaataaaaaacgcgcctatattggcgcgtttaatcatcttaaaagattaagcaactgaatctttaagacctttaccagctttaaagctaggtacttttgttgctttaatttgaagctcttcaccagttttagggttacgaccagtacgtgcagcacgttctttaacactgaaagtaccaaaaccaactaaagttactgtgtcaccttttttaagtgcttcagtaattgacgcaattgtcgcatcgagtgccttgcctgcatcagtcttagatactccccctttttcagcaattgcatcgattaattctgatttattcatgaataaaacatcctcttaatatcgtttgtttaaggtccaaggctatagtttaaaaggccatgacgcctttatagcaatgctttgggggaaaacgcaatactagagcagagcttttagcaaaaataaatgctaaaaaactgttatatatttgctaaatccctacatttttttacttttcattcaattttgccttcaatttctgattttcttcaattaaagcatctacctttatatgcagttgaactaggagttgttcaatgtgctgtaaatccttcggagtgaccaagccaattctatttaaagagtggtttacactcgtatctaaaattttctcgaccttgtcttttgtatcagaaaccgactcttttgctttttcggttactttaccaacagttgtatctgctaaatcacctgttttggattctaactcttcccctactttgactaatgagtcaaatagtttgttcccttcttcttcggcacgtgaaaaagcacccaaacctgccaaccagatttgtttagtatactttctaaaatctaatgcagattttctagaactttttgattttgatttatttttttctccttgctcttctgcttgtgtttctatgtttgcattatccattgatctaagctcctgatcggatgagagagacgaagtgttatttaaccacaaaatattcttataataacaaagtcaagacttgatacatttatgaaactgttctacaaaacaatcatgtcatgtaaatatatttaacaggacattgtgttaagtttgagataggatgtctcattctctcaattaatctctaatatttaaggataaacttttatgagtgaaacgcaacaaagacaaaaacatccacgtctgttgctgaatattgttctaattattttagaaacttttttctcatttattctcacccacgatggtgttcttcgcttgcaagcgaaaaagtttatcgccaataaaataacaatccgtattaatagctatttgccatttttcgacttctatgtgcagtttacggaaaaaggattgctatttgatattcactcatatgaccgtcggattgatttagaaattaatagtactctcgttgaccttatcaaaatttttgttttttcaaatcaacgtagcctgaataacatgcgaattgatggggatgcagagactaaaaaagaacttatcgatttaatttcgcatctcactttacctaagcttctagcagactggaaacagtggttcaacgcaccagatgatgaagccgaagccctagcctctcgcaaaaaaattgctccattacttgaaaaaatcgaccaacaacgctcagaaataaattcgttgcatgtcgaaattaaacagtatcaaaaccgaattgcacgtttacaacagcgccaacggaacattaacttgtgctttggtataattagcctaatatttattgtttatttcatatataatttgtgggtagcttaacttattttttctaacttgatcctgcacctgaattaaaaataaaaaaacttgactattttagtcgggattcataaaatcctattatctagtcttaacatgtgtatcgaatcatgcgccttacaactcgcggtcgctacgcagtgactgctctacttgatttagctttgcagccaactgaacaaacgatcacgctcgccgaaattgccgcacgtcaatctatttcagttgcttatttagagcagttgttcgcaaaacttaagcgtcatgggttagtttctagtgttcgcggtgcaaatggtggttatcatttggctcgaaacgctgatgaaattactgtgttagaaatcattgaagccgtaaatgaaaccgttgatgcaacgcgttgtgaccataaaggcaactgccaaaatggtgcaatgtgtcttactcacgatttatggcaagaactctctcatcatattgccgactatttagctaaaatcactcttgccaacctcattagccgagacaacgttcaaactgttgcattacgccaaaatgtaactggcacagattcagctcttttatcgggtacaggtatttgatatgaaacgtccaatttatcttgattacgcagcaaccactccagtagatccgcaagttgcagaacgtatgatggagtgtttaactttcgacggtacctttggtaatgctgcatctcgttcccacgcttatggctggcaggcagaagaaaaagttgaatatgcacgtgagcaagtcgcaaacttaattaaagctgacccacgtgaaatcgtttggacttctggtgcaactgaatcagacaaccttgctcttaaaggtgttgctcaattctatgcatctaaaggcaaacatatcattacaagtaaaattgaacataaagctgttctagatccttgccgtgaattggaagaacaaggttttgaaatcacttatttagagccagaaccacaaacaggtttaattactcctgaaatggttaaggctgcccttcgcccagatactattcttgtttctcttatgatggtaaacaatgaaattggtacagttacagatgtagcagcgatcggtgaattaacacgtgcaaataaaacgtttttccatgtagatgcagcacaagcagctggtaaagtcgatatcgacttatctacaatgaaaattgacctaatgagtttctctgctcataaaatttatggtccaaaaggtatcggcgcattatatgtacgtcgtagcccacgtgttcgtctaaaagcacaaattcatggcggtggacatgaacgtggtatgcgttctggtactttagcgactcaccaaattgttggtatgggtgaagcttttgaacttgcaggcaaaacaatgcatgcagaacaagaacgtattcgtaaacttcgtgacaaactttggaacggtttacaagaccttgaacaagtgttcttaaatggccacccaactcaaaacgttgctaactatttaaatgtcagcttcaactttgttgaaggtgaatctttaatgatgtcgcttaaagacgctgctgtatcaagtggttctgcttgtacttctgctactttagagccttcatatgttcttcgcgcattaggtttatctgatgagctagcacacagctcaattcgctttagttttggtaaatacacgactgaagaagatattgaccacgtgcttacaattaccaaagccgctgttgagaaattacgtgaactttctccgctttgggatatgtacaaagaaggtatcgatctttctacagttgaatgggcagaacactaattattgaaattagtgttttaaccctcatattaatattaggctgaccccgaggtttggagaagcgaaatggcttatagcgaaaaggtaattgatcattacgaaaatccacgtaatgttggtgttttagacaaaaactctgagaatgttggtacaggtatggtgggtgcacctgcatgtggcgacgtaatgcgtttacagattcaagtaaatgacaacggtgtaatcgaagaagcacgtttcaagacttatggttgcggttctgcaattgcatcaagttcacttgtaacagaatggttaaaaggcaagactcttgatgaagctcaagcaatcaaaaacattgatattgcaactgagctagctcttccgccagtaaaagttcactgttctgtattagctgaagatgcaattaaagctgcgattgaagattatcgtagtaaaaaatcaaaagcttaatttgttaccattataaacgttggagttttcatgattcatttaactgaaaatgctgcgtctcatattagcaattaccttaaaaaccgaggtaagggtgaaggcattcgcgttggtgtgaaaacttctggttgttctgggttggcttatgttctcgaatttgtagatgatatcgatgaacatgatcaaattttcgaacaattcggcgttaaggtttttgtagatcctaaaagcttagtttacttagacggcttagaaatggactatgttaaaaatggccttaatgaagggttcgaatttaacaatcctaataaaaagggtgaatgtggttgtggtgagtcattcactgtttaatcctctcctttcctttttcttattaaaacagtgccttttaacagcactgttttaatgtatttaattaatgtggacctcatttctaatgaatcattttgagttgttcaatttacctgtggcactcgatatcgatttggcaagcttgaaatcaaatttcttaagtttgcaacaacaatatcatccagataaagccgcagataaagatcaagcattgatcaaatcaagtgaaatcaatcaagcttttaaaacgctttctcaagttgatagccgcgctgcttatcttttagctcttaaaaagcaagatcatcatcttgatcaatctattagtgatttcgaatttctacaatccgctttagaacttcgtgaacaacttgatgaagcgacatcatctgaacatttacgtactttaagattagaagtacaacaatggattgatggtttagtccgtgaattcaaaattgattacagtgaagaagattgggcagaagcacgtgataccgtacgtaagttacgtttctttcaacgtgttttaaacgatattgataaagcagaagatcaactgttagatgatgaagacagttttgatttagacgacgatttttaattttgctttctctactttattttcaagggatttaactcatggcacttttgcaaattgctgaaccgggtcaatccagtgccccacaccaacatcgcattgcgattggtattgacctaggaacaacacactcattagttgcgacagtgttatcaggcaaacctaaagtactcaatgatgttcaaaatagaagattacttccttctatcgttcattatggggacaatacaactcattatggtgaagaagctaaaccgtttatcattgcagatccaaaaaatacaattgtttctgttaaacgatttatgggccgttcaaaggcagatattaaatttcaacacccttatgagttagtaggctcagaaaatgaaatgcctgcttttgaaacccgtgctggacgtaaaacaccagtagaaatctcagctgaaattttaaaacaattaaaagatcgcgctgaagacagcttacaaaatcctgttaatggagcagtaattaccgttcctgcatatttcgatgaagctcagcgtcaagcaactcgcgatgcagctcaacttgccggtttaaatgtattacgtttattaaatgagcctacagctgccgctgtagcttatggattagatcaagaaagtaatttagcgaccgaccgtaattatgtaatttatgacttgggtggcggtacttttgacgtatctatcttacgtttttcacaaggcgtatttgaagttttagcgactggcggtcacactgctttaggtggtgatgacttagaccgtctaatcgtaaaatgggctaaaaaacagcttaatattgatgtattaagcgatgaagattatgccgtatttattgtggcagcacgtcaagctaaagaacaattatcaactcaagattcagttgaattaaagttactcgaagcaactctcacactagatcgccctacatttgaaagcattattcaagtagcattagataaaacgattagtgtttgtaagcgtgtactgcgtgatgcaaaacttgagttaactgatatccaaaatgttgttttggtaggtggttctacgcgctcttatgctgttcaaaaagcagtacgggaagtttttgcccaagaacctctttgcacgatcaatccggatgaagtagtggcaattggcgcttctattacagccaaccagttaattggtaatagccaagatggctctcttcttttagatgtaactcctctttctcttggtctagagactatgggaggactcgttgagcgcctgatatctcgtaatacagctattcctgttgcacgtcgtcaagagttcaccacttatcaagatggtcaaactgctatgttaattcatgtagttcagggcgaacgtgatttagttgaacattgccgttcattaggtagatttgtacttcatggcattccaccaatgactgcaggccaagctcgtattgaagtcactttccaagttgatgcagatggcttactcaccgtttctgctcgtgaagcaacttctggcgtgcaagctcatatcgatatcaaaccatcttatggtttatctgaggcagatacggaacgcttattaattgaaggtttccaacatgccgaagaggacaaaaatcttcgtcatttaaaagaaactaaagttgaagcagaacgtgagcttgaggctcttgagcaagcattaaaagtagatgcggatttacttgatgaaaagcagcttgacgcactcaactctgctaaggaatcattaaaagctcagcttgaaggcagtgatattcaagcaattgagcacgcagttcaacaacttaaagtacatagtgatgcttttgcagcactacggatgaatcgacatattgaccatgccttaaaaggcacgaagctcgatgattggtcaaaatcaaattaaaaggtataggtgatcaatatgccacgtattaaagtacttcctcacgctcaattttgcccagaaggagcagaatttgaggttgaacaaaatgcaaatctttgccaaagtttgctcaacaaaggaatcaaaattgaacatgcttgtgatatgtcttgtgcatgtacaacttgtcatgtgatcgttcgtaaaggctttgatagcttagaagaaatgaatgatgttgaagccgatcttctagaccgtgcttgggggttggagcctgactcacgtctttcatgtcaggttaaagttgtagatgaagatcttgaaattgagattccgaaatacacaattaaccacgcttcggaaaatcattaataaataataaaaaaagctgcttaggcagcttttttatttatataatttatacctgatcttgttcttcatcgatatttataggcttaacttcatcctcaagtctaagctgagcaacaccttgagtattaaccaaagtttgttgaactttaatgcgctgaatcattttttcaagcacttcaaccaactcagggtattcgtagttttgtacttcttctaaatttaaaactaaatggaaacctttatattcataatcaaaccattgttgatgatctgatttatttcctgtgtatttttccatgacttgccatgtttttactgccccttgaataccctttaaataaattggggtcttaggcgcacatagaaaatcacttttgatcaattgataagtatcatcagaaatgagtatttcatcaatttcagcagcatactgtaaacgtgccgctaaatttacgtcacgacctacaatcgtataagccatacgatgggttgcaccataattccctacgtggcaataacctgtactaatacccatacggatatgtaaggctgaatatcccattttcttccatcgttcgcgcaacaacttcatttgctgacgcatagcaattgccatttctacacaggatttggcatcttgctcaaccccttgtgaattcggatctccaaaaaatatgagaatcgcatctcccataaatttatcgaccgtcgcttcatattgctttgcaatttcagtcatatgacttaaataatcgttaagcaagaaagctaagtcatcaggaattaaagtttctgatagttcggtgaacccctgaatatcagaaaagaatacggtcatttttttacgtttatattcgatttttgcttcagcttccccacgcataatcgactgccataattgtaatggagcatagcggcttaactgattagcaaaagcaatataacgtgtcatctggtcataataatgctgacgttgctgactaatttttttaacccagcggtgttggtaataatttccgatagtgataaacattaccaaaccaagtaaggtaattactgttaattcttggcttgtggcttcgaaatatggatgaaaaccaaataggaaaaatgtacttaaataaaaaataatcgccccaagcagactcgttaaacaaataactgcaaaggaaatacgactattaattgctgagtaaaataatgcaaaaagggcaataaatgttggaacgagattaaggtgcactcctgctagagtaacagccactacaatcgcatctattgcaaaaaaaacacttttttgagttttcttatcaaactggtactgcaaccagtgttctagtttagaactgacaaaaagtaaaaaagaaaaaaggaggaatatagatttgataattagtattcggtgaggtaaaggcatagatcactaaaattaatgacagaattgaatatcccatcaaacgatgaaaatatgcaaactgcttaggttcccgatctataaacctctctaattgcaccctatcctccacatttcaatgttgccacattgatatgtggcattacattgatttaatccatgcgccaatcaaaaggcatatcaccttggccacgtagagcaagcataagagtctgacgcatatgagctaaaacatcacttgtatatggcaccgctggtgtaccccatacaggtttcggccaagctacatcattttgatagcggacaacatgatgaaaatgcaattgaggcaccatattacctaaagctgctacattcattttatcagcacggaaaacgcgagataactggctagataaccagcttgattcacgtagaaactgttcttggtcagcttgactcaattcgtatagttccgtgattcctggtacgcgtggtactaaaatcaaccaaggaaattgcatatcattcattaaacgacatgttgaaagcgggaaatcgcctacaaaaaaagtatcttgagcaagttgtggatgcaaactaaacatatcttttataaatgacaataaacaataatggctaatactatcacatcagttttgatgtgaatattattagtagcccgtttgcttacaaataacaatgattttatgcacttattcatatctcaaggtataaatagtgcataaaatccgattacaacaaaacaaatgtcctaattagctagcactggttagaaaaataggtctcaggcatgtagttcactcatcaatttttgcaataaatcattgataaattgaattcgtttttcatactcttcaagctgcaccatcaccttcaaacgttgtccgccttccatacggtaataagtcggatttttttgcattaactgaataatactaatggcctgaactggcgtatctggtgaaaactcaatatttccaccttgagtattaatatcaattttcgtaatacctaaatgttctgctttcaaacggatttgatgcacgctaaataagtgcttaaccgactgcggtggaataccgaaacggtcaataagctccatacggatgttatctagtttttcctgtgtatcggtattactaatacgtttatagaataatagacgttgatgaacatcacccagataatcatctggaataagtgcaggaatatgtaagttaatttcggcagttaacgacaatggagcatcaaaattcggggttttaccctgttgaattgctttagtcgctttctcaagcatttccatatacaagctatatcctatcgcctgcattgagccactttgttgctcgcctaacaattcgcctgctccacgaatttccaaatcttccgtagcgagcataaagcctgcacctaatgtcgaagcacgttgaatcgcatcaaggcgtttttcggcatcaccttttaagtgtttaatcgaaggtactaataaatacgcgtatgcttggtgatgcgaacgacctacacggccacgtaactggtgtaattgcgctaaaccaagtttatccgcacgttcaatcaaaattgtattggcatttggaacatcgatacctgtctcaataatggttgagcacaccagcacattatattctttgtgatagaactgctgcataacttgctcaagttcgcgttcacgcatttgtccatgtgctaccgctacacgtgcttcgggtacaagcacacgaatattttcggcagctcgctcaatggtctctacttcattatgtaagaaataaacttgtccaccacgaagtaactcacgcaaaatcgcttccttgattgaagcatctgtatgctcttgcacaaaggtttttactgctaatcgacgggctggcggagtcgcaataatcgacaaatcacgcatacccgaaaaagccatattaagcgtacgaggaattggcgttgctgtaagtgtcaacatatcaacatcggcacgtaaagctttgatacgctccttatcacgcacaccaaagcgatgctcctcgtctacaaccattaagcctaaatctttaaactgaacattctcttgtagaagcttatgtgtacctaccacaatgtcgactttaccatttgccaagtcttcaatatttttcaaatgtgttttgtttgaaccaaaacgtgagagcacttcaatacgtactggccaatcagcaaaacggtctttaaaagactcataatgttgttgagctagtaaagtcgtaggaactaaaacagcaacctgtttgccattttgtactgcgacaaatgctgcacgcatggccacctcggttttcccaaaacccacatcaccacacaccaacctatccattggttttgcttgctgcatatcatagagcgtggcttcaattgcattagcctgatcaagggtttcttcatacgcaaaaccgcttgcaaattgcatatagagcgactgatccagttcaaaagcaaagccaggttttgactgacgacgtgcctgaatatgtaaaagctcagctgcaacgtcatgaatttgttctaatgctttacgcttagctttactccaagcatcagttccgattttatgtaacggtgctaaatccgggtcgccaccactataacggctaattagatgcaagttcgttactggaacatagacttttgcatcttcggcataatctagttgtaagaactcatagtcttgtccctcaatcgcgagtgtaattaagccagcataacgccccacaccatgatcgatatgtacaacaggagcaccaatgcttagctcagttaagcttcgaatcagaaactcttcggaaacttcctgttgacgcttgcgacgacgctgtacaactcggtgctcgtaaagctgattttctgaaataaccgttaattgatcagttaaaagtaagccacgatctagaggcgcattagtaatagcaattgcaaactgactaatttggaattgctcaaaattctctacattcggaatctcacctaaacttgaacgcaacgcatcttttaagctttcacgacgtcctgcactttccgcaaccaatagaacaggatgatttgcttcatcaatatatttttttacggcactaaatggtttttcttttttcggatcgactggcaacttgggtggttgttcagttttaagattaagtgcaccagctttttcttcaatagtttctgcgctcacaagcattcgtggaaactggtttagagcacttagcagatgatttggagaaataaatagctcttctggagcaagaataggttgatccatattatggcgtcggtcttcataacgacgcataacttctttccagaaactcgttaaatcagtatcaatatcattagttgtaattacaatgcaattctttggtaagtatgttgtaaacatactttgtgactgcatttgttctttattaaaaaatagcggtaaataaaattcaataccaggcgatgctataccatctaaaacgtcctgataaattggatttttcttaggattggcagtaggaaaaaactcagaataacggtctctaaaaactgaacgtccttcttttaaagggaattctttcgcgggtaaaaccgtaaaactttttagcgtggttgttgttctttgagtttctgggtcaaagaattttaaagaatcaatttcatcgtcaaataaatctatgcggattggagattcttgcccagatgcaaaaatatccataatactgccgcgtacagcaaactcaccatggtcataaactgtatctactaagtggtagcccgcctgaactaaccttaatttttgttgttctaaatcaaatttttgacccacttttatatcaaagtgttctcccaatacccatgagtaaggtgcaacccgttgagccaaggtacttgctgaaatcagtaatacgccttgctgaggcatattagataaaatagcaagacgttctgacacaatatcttgatggggagataaacggtcataaggcaaaatttcccaatccggaaaaattgtcggcttaactccataaaactcaagttcactttctaattgagcaacatgttggttgtttctagcaactaataccaataaagaagaatgttgagtggcaatttctttaagcaataaagctgctgatgaacctaataatgaccccacccaacgcttttcaccggccttgagctgttgcaaattcaattgagagatttcttgttgaaacatgtatatggcttttatgagctaaaaagatatgaggttaatagtagcatgatgtttttagtgaattgagttatttttctgcaatcaagctactactttgtgatacttttttatagttcttaaacaatcatttgaagttatttgtctcgtaaaaacatcacataatattggtttaatacctgtatgattgctttaagctcaagtaacttttcttgtgtattacctaacctttccacatatcgttgcgttgcaatctctaaatcaatcttttcattaatttgtggtgtaatttgaaatagcttaggtaagttatcaaaattctgtaatttacgatttgaaaaatattcaaggtgctctgaccacttttcattaatcacgacatttttaataactggaccacgctctgaatcaaaactgagctgattctcttgtaaataaatttgttctggtgtctctttcgaaccttgaaaaagttgggttaattttttaaacatctcatcacatcatattaatttcaatttatatagtagaggtaatctactcacctctaccatctaagtttattttttaatgcctactcatcacccaagccatctagaaaatctactgtcggtacgaaaaatagagtgcctgtttgggcagtactaaagtcaagtaatcgatcaagattaccttgctcatttcctaagaacatattttcaagcatttgacgtgtcgtactaaatttacgtgagtaaccaataaaaaaagtaccatattcatttttggatggattcgaaaaaggcatatttgcacgcataatttttagttcattgccttctgcatcatgcgctttacttactacattatgtgctgttaaaggtttctcctcatcatcaagctcaatatcgttgaactttttacgcccgataactttttcttgttcatcatcacttaatgcacgccatttttccatatcatgggtatatttttggataaatgcataacttcccccaataaagtcaggatcttcgttacccactaatgcccattgtgcagcaattacaggttcaggattttctgttccatctacaaagccaataatcgcacgcccatcgaaatatcgaaaaccatgcacttcatcaattgggtaagttactttacctaactgttcattgatgatacttcctaactcataacataaagcttgtcgatcagcacgaatatgaaagaataaatccccgggtgttgaaacggctgtgtattttgggcctttgatttcttgaaatgtttctaattcttgaggctttgcttgctgtggaaataaaatatcccacgcgtttgagctaaaacctaatatggcattaaatttagtttcaggataacggttagacaaacttctggttaacgctgagaatttaccagcaaaatcttttactttttctacaacagaatcaccttgagctaatcctaatacaataaataaagcattttctccaggatgactcgttacaggctgaattctcatacattccataaaacaggccttattttggtaatttaaggtagtaatttagcatattcatgtttttatcgtatgatttcttattgttgtcgcttcttaaaagagactgagttatctcaatctctagcgctctagcgctctagcgtgtttttctcatttatattttaactgccatattgtttttttaggtactttacaatttccgcagattcaaacattttaacacctgtatttgggtccactaaataaggcacttgcattttaccttgcatgaccggcaacaatttttctcgctttccctcttttaaaggttcatatttgcccggttttaaccgaagaatcgcaggccccatatcttgccatctttctttggcaacactatgtaaaatgtaaggtagctcaagctcacttaatacacttcttactactcttgaatacggacttgcttcaaagctccatagttcaagtttatgctcaggcgcagctctatttactatttttttattaatccagaccccacgagcaccatttaataatgttccggcaaacgccagatatggcatttttggataatttgaaaacttatcaggagtttggcctgtcttaccatagtatttaaataaatgatgaataatatcttgtgattcgtataatttgtcacctgtattttcatcaataaaaaaaggaaactgtaatttaccgccaatttctttaactatggagcgatattttaatccacctttcgggcatggataaatttcgacatccaaatttaaaagtgtaatcacttcacgaacgcggcgacaaaatggtgaaccctcaaattcataaagtttaagagctctaacaggctgtttaggaaatgctgtacctgtaacacctctaccaccttcagcaattgcagacgctaatgcttgcagtactttaatttgatgattcaccattatgcattcctttaattgtggagctagactagtttttctttagcaatcacaattccattattatctgcatagataaaatcaccagattgaattgtgactccaccaaaatacaaaggaatatctacttcaccaatgcccttacggttacttttttgcggaattgcagccaatgcatgtacacctaaatctaaggttgcaagtgcatcaacatcacgtacacagccataaataaccacaccattccagttatttttaacagctgattccgcaatcatatctcccataagtgcacagcgcattgaagcaccaccatccacaaccaataccttccctgtaccatctgtagccaataactcttttacacgcgagttatcttcaaaacactttacagtcacaacttgtccgccaaaagtttgacgtgcgccataacttttaaagaacttaccgtccattgatggtgtgaccacttgcaaatctttttccggattgtcatctaataaatcacatgtcacaaatggtactgtcgacacttttattctcccttatcgagtttgttgtatgctgagattatcatatcgtttaaaagcttcaatttgcgttaatgccgctacgaccatggtatgagccaattgctctgccgtgactggtttatatttgaaaggcttattccatttattttcaataagtttaaatagactttgtcctaaatcttcaataaaacgcacatcgctacgcttaccaatcaatagagaaggtctaaaaatagataatttttcgattcctaaactttgaatataatcttctaactctccttttactttattgtagaaaattggcgaattagcatttgccccaagtgcactaacaattaaaaaatgaatatgtttatcttggattaagtctgcaaagtgggcatttatctcataatcaactgcataaaagcgttgttttgagcccgctatttttaaagttgtacctaagcaactaaatgcatgagtatgaccattcacatcttcatcattgagcaataaaaaatcgtctataacgagctgagtaactttcttatatgtattaagtagttgtgattcttttcttactacaacggtaatggcctcaaattctggtgtttgctcaagttgttcaacaagcgctaaaccaacgagtcctgtagcacctactacaattgcttttttcgtacttatagtcattttttatccaaccctctttaagtttgtatcaaatttaaccttttcttacggttttagcagcccctaaaaccgcttaaaatgctctcaaggcttgacttcacggtattgattcatcacaatatggcacttgtttacgggctggtgatggttacaccagtttactggattgaccacagcccgcccagaccaacttattttcaaggagtgcaagagtggcaaactctgctcaagctaaaaaacgtgcgcgccaaaacgttaaagcgcgtaaacacaacgcaagcttgcgttctatggttcgtacttacatcaaacgtactttaagtgcaatcgctggtggtgattatgctgttgctacagaagcttacaaaaaagctgttcctgtaatcgaccgcatggctgataaaggcatcatccacaaaaataaagctgctcgtcataagagccgtttaaatgctcaagttaaagctttagctaactaattgaagcatgtaaaaaaagcccaacagggctttttttattgtctatgtttttgtgtttactgtactttatgaaactcagaaacatctaactcgtaagttttgcctctccaaatccactttaatttacaatttggaaattcatcaccttcaaaccatacaaacagcccttccatcatggcaggccaatctgctttttgtatctgattattacccgaaattacggcaactatggcagcaataattgtgtcatgactaacagctaaactcagcccactttttgttttaggatgagtctgataaataagttccaacacatctaaaaccccagtaatgggatgtttcatacccggcaaggcattgttcacaaaactattaataaaaccaagtgccccttgtttacggaaataaggcgccgcctgttgaatatccagtacaaagctaccaggttcaaccaacaaaccttgttcaactatttcaattgtatgtgtattcggctcagggctcactccatctgctccttcaatcataagtgcagcagtgtctacacaacgttgaatcgggctagaaatgcaatgttgaattacacgatccgtgtttttaattaaatagctaccccattcctgagcaagctcacgtccttgcggtgtaagctgaagatcatatcctgccaagccttgcccatctaccaactctcttaaggagtgacgtgtaaaaagggttacaggggtcgaagcatcaggcaataaatcaattgcttcaaacatgcttttaggcaataaatcgagtgccatttttatcttgtcatcttttctcaatattttgccactatagcatgtctacaataactctcaatccaaaacacctgattgagctaaagcttcaaatgctatttttttgctttcctgatcacgaaatgcgataaagcccccatttaatacggtatcacgctggttatattcaaagggcttacctgttagagtgagtaaacctccacctatactttctaataatccttgacctgagctggtatcccattctgatgtcggatgaaatctaggataaatatcgatctctccttctaacatcatacaaaacttataagcgctgcctgcttcacgtcgaattacggtacgaatcttttcaataggttcaatgaatttctgatatttcggatttttactactatgacttaaaccaatttgtacaggagcttgttttgaataaggtgttttttgatattgataccattgttgttggctaaagctatatttaaaaggtaaatcttttaaataacctaaataaacaacttgctcacatggcacaacaatcaccgaaaaaatcgtttcacgcccttcaatcaaactcaagtttatcgtgaactcatctcgctcatgtataaactctttcgtaccatcaagtggatctagcatccagcaagaagaccaagcatggcgagcgctatagtcactttcttccgataaaaccggtaactcaggtgtaatttctgcaagatgctttaataaaaaacgatttacctttaaatctgcttgcgttacaggtgaatcatcatgtttttcttgaatcgtaaattcatatccagccgaataattttgatattcttgtaataagatttggctagcttcttccaagattggtagtaactgttcaattaaagcatcattggggcgagttgttgttataaacataaataagctctatttactttccttttcattataagtgaattatgacaaattcaatattcaccaacagtctagtatccttacaaaaagacttaactttttattaagaacactattattccttcaacagctgaatctttatattttaacttgattagacgcttattactcaagagaaagctcagttaatttttgtatagaaaatatgctataacttatgaaaaataaacaacttaaagtaaattcaaccatttctttttcacgcatttcttgctatgttcaatagcacaataacaaaatggaagactaaatatgatgctatatggatatcacttctcaacaattgaaaataactgggaagacttaactccattaaatgagtttttacaaacatttgcagatgatgatggtgatgtctcccaaagagataaagaatcacttaaagaaattattgctaaatccgatacagctttggccttagctaaagaaatgggttgggatggcagttatacaggctgtccttatttattttggttaccaagtaaaaatacgcaatcttttgaatatggatttgtttttaaacaaacctcagataactcaacttttgtaatctcaccgattgaattggcttatctggcgcaagatgagcaggtacaaactttaagtaagaatattgattaaatatcaaaggttattgacttaaaaattaagccaataacctaactccaatgcagttattcaaacatacttaattgaggtgtaggttttataatcttctctttaggaacatgtaaacattcaaattcctcaacaggaaaaccttcaataaaactggaaatatctggtgtctctaaacttaaccattcatctaagcggtcatgtggaatcacaatgactgatcttttaacatcacccggttcatggaagtctttcatcatggggtgatcaatcgcatccatggttaacatactcgcagaacggacaatcgtttcattcattttgcaaatttcatagattgctgcgataaaaaaagcctgcccatctttacggcgtacgccccaccgctcaggtttatcatttatatatttactctcataaaactccgtcacgggtattacaccgaacttacatttaagagcagcttcttgaaaactcggtttttggaaaattgtttcatgacgagcgttataagtatgttttgctatgttcgtatcttctgcccatttaggaaccaaaccgaacatgacttcacgccactcaaaaccttgcggtgatttgaataacaatggcattgtcccacccggataaacctcatcggcatagctaaagccgaccacaggcaactgaagttgctgcaattgggcaagagttaaaggcttaaagttggcacacatagcaggaataaaatactgtacttttacatctcttattttataagtatttattctataaaccaaataaaaaggcacttaaaagtgcctttaacgacataactttacgcttacgaaacgtgctgaatcccttgtggaatagcctgcaatagtcgtttggtgtagtcatgttgcggatgtgcatagagctcatccgagttggcgatttcaacaacttcaccatgattcatgaccataacctgatcggagatatatttcacaaccgacaagtcatgtgaaataaaaatataactaagcccaaactcatcttgtaagtcttgtaataaattaagtacttgtgcctgaactgaaacatctaacgccgaaacagattcatcacaaattagaatttcaggctttagcgttaagcagcgcgcaatcgcaatacgttggcgttgaccgcccgagaactcatgtggatatcgataataagcttgttcaggcagattcactctctcaagtaaaccaagcgcaatttgcttacgttccgcgtcatctttaccaattccatgaatttgcataggttccaataagatctgcccaatcgtaaagcggggatttagcgaagcatatggattttgaaagatgatttggatcttcctttgatatttggcaaactctttttcagttaaagaaagaatatctttaccttcaattaaagcctgtccccccgatgcttgatgtaagcgcatgagcaataacccgacagtcgttttaccggagcccgactctcctaccaaaccaagcgtttttcctttagccaatttaaaagaaacgccttttactgcctgaaattcttctttgccaaacaatcctttacgactataaaaactttttttcagatcttttacttctaaaataatgtgctcatcgccatttaaaccacgtttacgttcaggaatttctgaaacatcaaagctttgctcaaccaatatattgttttcttgtcgcataaaatcactggttacaggcaaacgataaggtctttgtgacatttgaggacgacagtaaagtaaggctcgggtatatacatctttaggctgttccaaaacttgttcagcggtaccttgctctctaatttcaccatgtcgcatcacaatcacttgatctgcaatttcaccaaccaaagccaaatcgtgagtaataaaaagcatcgacatttgacggcgctgacgtagtgattcaagtaaatcaataatttgcttttgaatggtaacatcaagcgctgtagtcggttcatcggcaatcagtagcttaggttcacaagcaattgccattgcaatcatgacacgttgctgctgaccacccgaaagctggttaggataagcatcaattttcgtttctggtgaaggtataccgacctctttaagcaactctaaaacacgttgccgcgcctgttttcggctcatacccatatgtaaacacaacacttctgcaatttgattgccaaccgtaaaaaccggatttaatgatgacatcggttcctgaaaaatcatggcaatatctttgccacagatttttcgcatctctgtacgcgataagccaagcaagtctttaccttcaaaaataatcttacttttctcatcaatcttgctttgacctacgggaagtaaacccatagttgctaaagaagtgacagacttaccactacccgattcaccaaccaaagctacagtcgtattggtcggaatatcaaaggaaattcctttcacagtttcgatatattgtttatcttcacctttaaagcttacacgtaagttttcaatgtggagtaatggggtctttttttcttgttctgacatttggatttcctcttattttagtttcgggtctaatgcatcgcgtagcgcatcagtaaacattgaaaatgccgtaaccaaaaccgccattgcgacagaggctgcgacaagctgccaccacttacctaaaagaagttcactttgtgcttcatttaacatactgccccaagacactacacctactggcacaccgaaccctaagaaactcaaaatcacttccgatttaataaaagaaaccaccaaaatagacatttggaccaatgcaatatggctgacgttaggaaaaatatgaataaacatacggcgaaaatgcccgacaccaatggctttagctgcaagtacatattcgcgtgccgtatgtttcatatattcagcacgaattaaccgatagacacctgtccagcctgttaagcctaaaatcagaacaatagataaaatacccttttgttgtagtacagcagcaatcgcaagaactaataataaatatggaatggaagtaaaaatattataaaaccagttgagaatatcatcgacccaaccaccaaaataacctgaaattgctcctaaaagcgttcctaatgtgactgccagtaaggcagaaacaagccctacaataattgaagtttcagcgcctttaatggtttttttaaggacatcttgtccccatttgtcagcaccaaaaattagggtactttttagttcactttgctgatcaagtaaatgtccaccgagttgctgatcaattgctttcatatcatcagctaatggatcaactacaccataataatcaattgcacttccagagctcttttcttgtttgatttcggccttaagttggtgaattacatcttttaagggatcgactggattttccggtaattcctcatctacagcggctgtacttttcaaagcttccgttgtcttatctgcacctataaatgtaggaggcgcataactgacagcaacttctttattccaatcagatgcaatcacacccgttagagatagtattaatacgatcaaatagaacaacacaacaatgagcgatgccattgcaattttatcggcccggagacgacgcatggcaagtcgccatagccccgctgaagcaggagcggtctgggtttctaactttctttttgataaaacactcagcataacccacctacttcaactgtacacgtggatcaaccactttgtagaccaagtccgcaatcaaattaaaaatcatggttgcagctgcaatatatacagtaatggctttgatgacaggaaaatcactacgctctacagcaataatcacttcacgaccaataccgggaataccaaaaaagcgttcaattaaaaatgcacctatcaataatgccggtaaatttgacatcacatcagtaataatcggaattgaggcattacgtagaacatgcacacttaaaattcggctttcccctacacctttagcacgtgcggttctcacataatcctgatttacttcatcaagcacaaagctacgatataaacgtaaagtaggtgcaatactcaccaccagcatgattagaattggtagtaaggaaaacttaaataaattttcggtaaaactatcgctccatccctgtactggaaaccagctcagttgataagccagaacatattgaaaaacaataatgtaaaccaaaatactaatcgacatcccgatggtacataacatcatgaccatacgatcagttagagagccacgtaccgccgctacagccaatgctaaaataattgaaataactgtttgtaaaatggtgagtggaattaaaagtgtgagcgacggtcctaatcgggttaagataatttgtgaaacggattcacctgtgctccaacttgcgccatagtcaaaagtaagaatttgcttaataaaaatccaaagttgaacataataaggttgatcaacacctaactgtttacggatattttcaatctgctcagggttagacatcttacctgccaaaatataggcaggatctccaccgacccaattaaataagataaaaataagcagcactactcccaacatggtcggaatcatctgccataaacgccgaataacatatgccagcatagtgataattccttatttaacccgttgtccggtaatttcgttaaagaatgctttattgtcaggatcacgaccaaggaaatctttaaccaattcagctgccggtttttggctaccctgcgataaaatcgtctgacgataacgttgtcccacttgtgggttgttcaggttgtcaccataagcagaaagcatgtctagcgctaaaacctcagaccacatataaccgtaataacctgcctgataaccacccattaaatgcccgaattgcccagggaattcagttgttggcacatatcctaaggctgtagcagcttccattttttgccaagtttctaaaggttttacttttaaggcatctgccgtatgaagtgccatgtcatactgtgcataaagcgtctgacgtgcataacgcaagccacggccatagttatgtactgcttttaaacgggcaattaactcatcgtcaacacgtggacaagctggatcgcaataatcggccactttagataaggtttctttacggcgtgcccactcttcatacatttgagaaggtgcttctacaaaatcacgctcgacagaagttccggactgacttgcatagcgtgtgtttgataagatgccatgtaaagcatgaccgaactcatgtacaaaagtttcaagctcatcactatttaaacctttacggttaaagttggtcaccaatactgaaatcggtaatcggttggttaaagtgctgccaccatatactccccaaactgctgcatggccatatttcccttcacgggggaatttatccatatataagccaccaaggagttttcctgtctttttatcaactacatcgtaatattcaacttcatcctgccatgctttaactttgacaggtttaaaatcaataccgtaaagatcagatgaaatagcaaataaccatttttgtgcggctaaagtcggaaaataatcacgaagcttttcctgatcaatttgatatttactcttacgaagtttttcgctccagtaagcttcactccaacgcgttatctcggttttgtctaacggcgtctttaaggtttgtgctttaaatgcacgaagctcttctacttctttacgttcaagtggtgctaccgttttttgtacttctgccaaaaacttgtttacagtctctggtgtttttgccattcggtcttttaaagcccaatctgcataactcgcttttccaaataactgtgcaagttcataacgtaaatctattgcctgtttgagtagttttaaattttgtttagtcccacgtcgcgtaaaagcgatttgatatctttttcgggcatcatcattatccgctagctccataaatggacgatattccggatactcaaaacctaatagataatttcctttcgtatttttctttaaccccgaaatataactttccggtaagcctttcatctcttcaggagtaaattcaagtttttccgggttatcacgaatattacggttatattcttgttcaagtttagtcaactcatccagaatagccttcattcttgcgcgttttgctggttctaactgaacccctgtgtcttcaaattgatccagaatatcttgacggtatttctggtcaatcggatcatttgcttttgtatttttaattacgttatacagttttgaattttggaatatatccgtatgaaactgattaattttgatttcgcagtcttctgctgccttacgtaatttcgcatctgggtctacattactatatagacctatgggccccgaaaaatcttcaagatgagcaaaaattttatcccacttggctaatatgggagcagcggcagcatcgtttttaacaggcgttttttcaaaactagaaatctcttgctgaattttttttaaattagaatcacaccatgctgggagttgctctgctttgagtaatggtaatgtcgcacgcgtcgcttcagccgatgcaaattgacttatacctatggtcaacatacataatgtagtcattttcagtgtattatttttcatcgtatctccaatttttttcatttaatgattagatttcgtatttgtatcaatatcgaagtacatccattcagcatgtaaaatcggatgcttcttatatccaataattcgtggttgggccaacatattgcgatagcgtgcataagacatttgcacaggcatataaacctctaacaagcgcgtcatttttcgatataacgcatctctttctgggcctggcttcacttgttgagactggcggtacaactcatcaaactctggtatcgaaccacaagaccagttagtcatatgagtatttgggccataaaaattctgcataaaattatccccatctggataatcagctatccatgcagaagaaccaaacattccctcacattgtttctgtgatcgaagtaagtctgaaaaaagcattggcttatacaccatgcgaatatgtaggctatcgaagtttttcttccaaagttcagcactttgttggccaatactgtcattgcgcgctttatattcgaccacgagcggcttgccgtttggttgtgtacgccaaccagaagcatcttttttgtagtgatatcgatccaacagcagattggctgcttttactgaatatggtgtactgcttctatactgtgggtcatatcccactacaccaggtggaactgggaaatgaagacgttctgcatcactattccttaccaatttaatctcttgatctattgaacgggacatcgcaatagcacggcgtaaggcaattttttctttactcattcctccaacaacgggatctttgagattccaatagatataactaatttctggatcaacaatacgagataattgcacgccttcttttgcaagctcgggtcttaatttaccgtctttaatcgcttttgaaactaattgcccttcaagctgaatgatatctacctcaccacgctggaatgctaaccatcgtgactggttttcttccatgacttgaatatcaattgtgccgatttgaggcatttgtttacctttaaggcgctttacaattgcttcatccccggggctactggcattaaagttccaggtaaaacctcgatattcaggatttgcttttaaaacaatacgtgaggcaggtatccacttactgagcatataaggtccggttcctaccggatgccccataacaaaaccagctttatctttatatttctcgatgacttcgcgtgccaccgcacctgtcggatcatgggccagtaataaaggaaagttatagtctggttttactaaccgaatcaccaaagtgtacttatcaggtgtttgtaaaccacttacattttgatcgtaattaaattttccggatttattggctgctttgactaaagcattcataccttcaattttatcttccaataaccaactattgggtgagcgtaaatttgggtccaataaccgcttaaaagaatatgcataatcgtaagctgttaactccctaggtttacctttaaacgctgggtcgggcgtaaagtaaatacccttcttaatgtgaatggtataagtcagaccatctgcactcacttctggcatagccgtagccacgtgtgggattaattttgctggtcttgccaaatagtcataggtatataaagtttcaaatatagatgtgagtacatgcgctgaatataagtcatgtacataagctgggtcgaagcctgtttcagctgttgggaatacataacgcaaaactttatttggatcggctgggcttttcgcaaaaatagatatagaacccgttaaagccattccggcaaagaataggccgacactacagtgcttaagcttttgttttaaattttcggtcatgatgatctttatctaaaattattttttaatagaggtaatatcaagatattgccagtttgtattcatcattgggtgagctttaaacccctgaacttgaggctgtatcaaccaattacgaattcgtgttacatgaataatccaaggattatcagcttctatctgacggttaagtttttcgtaatatgggagccgttgttgaggtggtaaatgaatggcctgagtataaagagcatcatatgttttagactgataacaagcatggtttccctgcccagcatttggtccatataataattgtgcaaaattatctccttcaggatagtcagcaatccatgcaccgctccagatcatatatttacattgagtagcggcttttaagttatctgcaaagttacttaccttaaagtcagctcgaatgccaatcgcatctaaattttttttccagagttctgaatgaataaccgatgctgagctattttctgtattgatttttaaaattaaaggtttgccatttggtaaggtccgatagccatcagccgcttttttataaccataataatcaagtagtttatttgctaacagcggattatatcctacgctacttttatatttagggttatatccgtttacaccttcaggtataaacatttgtgatctaacagcctgacttttataagcttgttgtatgctttctttttgattgtatgacagagtaattgctctacgaagcgctattttttctgggctaaaaccaccgatcactggatcccgcatattcatcatagtataggtaatctcaggatccttatttggatagtgcttaattcctctcttcttaaaagaagctttaagctgatttccatctaaagcttgaggaacagcattcgctgtgagtttatcaaagtctagttgtccagactgaaaagctaaccatcgtgactgctcttcttcaataatactgaccaccaccttgccaacttgtggcattttctttccagacatttccttaacaagttggttatcccaaggtgttcctgttgacttaaaattccagacaaaaccacgataatcaggattagcaactaactcgaccttacttctcggtacatatttacttaacatataaggaccagtacctacgggatgcataccaatacggtcaccgtaatagtcaacaacctctttagcaacagcaccaaaagtaatataggcaagaatataaggaaaattaaagtcttggcgagtcaaagtaaattgtagagtatatcgatcaagagctttaactccagcaatcggagcagcataatcaaattttccagttttctttgcttgagctacaaccgtatcggcaccttgtaacttaccatcaataaaagaaacagaaggcgctctatttttagggtctaaaatacgtttaattgtatagacgtagtcttcagccactaactcacggcgtttacctttaaaagctggatcattggtaaaatagatacccggcttaattttaaatatataaactttaccgtcttgttccactttgggcaggctttctacagtattgggaactaactgtaatggacgtgctaaatagtcatatttgagtaaaggctcaaaaattgcctcagcaatattagcgctatagaaattggtggttttaaccatatcgaagccatcatctggggcctcataggcaacatgcaaaattttgtttggttgcgctgtcgtaattgcgtaagcacaaggaactgatgtaatagccagacttaaaatggcgagcttaaaaaattttaatttcaagttcatacccacgtaattagtttttttaaaagatattatccttttgagtaacatctaaatctgcataagaaaagttctttttcaacagataggcctatttaggatttaaaatttgctttcctttatgctctttcgatttgatcaaatggaaaaataaactcaaatacctagtgttttgtaaccattgaatataaagcgaatttcatgccatttattaatatccatcttaaaatatttaaaaatattaaaaattcatatttttattagatacttaaaaacgtttgaactatataaataaaagtaactttctgccaaatattatattcatataagttaatcatataacatcttaaatgcacaaataaaatacattaaaaattaattatgatccacattagatcaagcctaacttacagatacttttaaaacaatctattgattaataataaaaatataatttaaccatgtagtgataaatattataacattacatattaaaaggctctaaaacgatacatttttatttaataagcatgtgaagagtccagtaatgtatattttttatacaaataaatttgaaacttttcgccaacatcaaaaaattttccaaatggaaaatttatttttatatcaaaaaagctaaagcatcatactcaagcataataaaatcaatatttatcaatattttgcataaactaaaaaaagaaaaatatatagttggcacttgctttgcttaaaaactttccagcaatatcgctaacgacaacaaaaagggatcaagtccacgatgaaaaaaaaatacaatgttcgatctcaggcaacccccaagattggcaaaacaattcttaaattaagcacccttagtttaagcatgatgtgtcttaccatggcacaagcagcagaaacggaacaatcaagtaccgatgaaaaaccaacaaaagtcgtaaaagttgccgttacaggttcttcaattaaaggggttgcggcacaaagtgcttcgccaattaccgtggtgaaagttgatgaaatcttaaaacaaggggtaacaacaactgaagaggctttggcaaagatcagcgcaaaccagtctaattttgttactgccagcaacgtaggtacaagtaaaacagctggctcggcagcaaaccttagagccttgggtgccaataagacacttgttttacttaatggccgtcgattagctgcaaatgcatatgacagtggcgttaccaacttaaatattattccactcgcaatgttagaccgtattgaggttttacgagatggcgcctcttccatttatggtaccgatgcaattggcggggtaattaacttcattactaaaaagcagtttacaggacttaatctgactgccggctatcaaaaaccagaacaaaaaggcggcgagcagcaagactacagcatttttgggggttttggtgatttagacgaaaatggctataacgtttttggtgttgtggactatcgcaaaggcgatgatgtcatggccaaagaccgtaaagttagtcggcgtggaggaatattacccgaattaggtgtcaatagaaccagtagtggttcattccctgccaatgtcccaggtttaggtaacccttacgcatccactggttgtggtaataatcctcttaatagtaacgatgatggaacttgtcgatacaacagccaagccgtgattggaattgttcctaaaacagaagacatctcagctatgggccgagcaacttttaaattaaatgataattttaacgcgattgcagaatatttatatgcaagaagtgaagtcactacttcagttgcaccagatgttttttttgatctgacgcttgaccctagtagtaaatattatccaggtaaaggtatcactccagctttagctggcgctacgggaactatccctctatatctacgttcacaatcgggtaatcgtgtaagtaatagtattaaccaatcacatagattatttgcgggtatcgagggtgaaactcatggttgggatattaactccggggttacctatgctcatagtagtgcatcggatgctatcgtaagtggctatttaaattttgataaaacacaagaagctttaaacaatggtattttaaacccattcggaccacaaaaccctgaagatgccaatgtatggaatgagttaggagttgaaggtaaatacttaaaagctaacctagatacaactactgtcgatttcacggcaagccgacctatatttaaattaccagctggagacgtggcttttgcagttggagcaagctatcgttatgaagattggacttcaaaagtcgttactgatgttgcccgagtggcacctagcacaggtgttgatcctgatgagccagtaaatactggcgatcgtaatattaaatcggtatttaccgaatttcatatcccccttcataaaactttagaagctcaaatcgctgctcgttatgatgactacaacgattttggtgatacttttaatccgaaatttgcacttcgttgggaacctattaaacagttaatgttccgtacaacttatagcacaggtttcagagcaccaacactttgggaagttaatggtgcaaattcgataactaatacaggtgcatcatataatgatcctgtgctttgccctggtggagttgtacaatcaggaggaaaaaaagaacgcgattgtaatatgcaattcgacagacaaaatggaggtaataaaactctagatccagaagaatcaaaatcttttaccgctggcttagtgtttgaaccaattaaaaatttagcttttactctcgattacttcaatatcgaagtcgacaagcaaattgctacactttcagaaactgctatttttaatgacccagtgaaatatgcagacaaatttgtacgtaatcctgatggctcattagattatattattacaacccaacaaaatttaggtggaattaaaacttctggttttgacgtcggcttaagttgggtttctccaatgactgctacaggtcgattcggtttcaatattgatggtacatatataacagattacaaatatcaagccgaaccaaatggagaatggataggtgttgcagggtcatatagcggcttagactatcaatccattattctgcggtggaaacatactgcaaacctaaattggaattatgaaaactgggctttaaacctacaacaaaacttctctcgtgggtaccaagatcaaaactctaacggccaaaaccatagagtcagcgactatacaacatacaatatttcaggcacttataaaggctttaaaaatctagaagttacagcaggtattaagaatatctttgatgaagaccctcctgcttctaatgtaattgataacttccaaatggggtatgacccacgttacgcagatcctttaggacgtacttactttgtacgaggtacatataagttctaaatggtagttctgcaaatgtagctcacaacagttagtttgcagaacaaatactcattcttagccaaacagtcattttaaaaattgtttgtctacagtttcaggagtaactatgggcatgacttttacagacatagaaaataaatctgccaaacgcctaattggtattgctgcagtcatttttctgcatcttcttgttgcctatattctgatgtcaggtttagcaaacaatattcaaaaaccagcagaaaaacctgtggaattacaaattattcaggatattaagccacctcctccaccaaagccggaagagccgaaaccaaaggaaaaaccacctgagccaccaaaaatggtcgaaaaagttgccaaggttcctgagccaccaaaagaagtagagaaagtagcaacaccagtacaaaaaacgacgccagtagctcaaccgactaaagtcgctactccggctcctgctgcacctagtactccttctccgagccctgttgctgcacccgctccagtggcggcggctgcaccagcacctaaacccgctggtgtaactcgtggtgtttcagaaggctctgcgggctgtgaaaaaccggaatatccacgcgaagcactcatgaacgaagagcaaggaacggtgcgtatacgtgttttggttgatacatccggcaaagtcattgatgccaaagtaaaaaaatcgagtggcagcaaaattttagataaagcagcaactaaagcctacagcttatgtacgttcaaaccagcaatgaaagatggcgtgcctcagcaagactggtatgaaattgaatatccattcgtaattgaataaacaattgaattagcaagaaattaaaaaatattggagatatatgatgaaaaaatcaactcaaccactagtacatttcgcttctgcaagtttaatcgcagcttgctcgttacttccattaagctcagttttcgcagaagaaacgaacaatgctcctgtggcaacagcaactactgaagctacttcaaatacaagtactccaactccaccaccaaagcctgcaacaagtgaaactgttaaaaatccatatggtctagaagccctttggcgtgaaggtgacttagtcgctaagtctaccttgtttattttagtactcatgtcgattggtacttggtacatcatcatctctaaattattacaacaaggtaaagtcaaacgccaaggtaaagaagctgaaaaacatttctgggaggcaacttcgcttgataatgctgcagaaggtttagaacaaagtagcgcgtaccgttttattgcagaaaaaggcattaactcgactaaatcacacggcggctcactacttgaacgcattgactttaatacttgggtgagcatttcaatacaacgtgctatcgaaaaagtacaaaaccatttaggcggaggtctcgcttttttagcaacagttggctctacagcacctttcgtaggtcttttcggaacagtatggggaatctatcacgctttaactgcaatcgggatttcaggtcaggcatctattgataaagttgcaggcccagttggtgaagctctcattatgacagctattggtcttgcggtcgcagtacctgctgtactgggttacaactggttgactcgtcgcaataaagcagtgatggaaaatgttcgttcatttggttcagatttacatgcagttttattaagcggagaaattaataccaacaattcaattaatcgcagcattaaataatcaggagcagacattatgggtatgagtgttggttctgaagatgatgaagaaatgattggaacgattaacacgacacctctcgtagatgtcatgttggttttacttattatttttcttattactattccggtagttacacatacagttccggtgaaactaccagaagaaaaaaatactccgtacgcgaccacgcctgaaaatattcaactttcagttaataagaaaggcgatattttctggaacgagagttatgtaccgaataaagaaatattgttagcaaaattacaagctgtggcacaaaaaagaccgcagccggaagtacatattcgaggagatcagcttacccattttgaagcgatagatcaggtcattagtacgaccaaacaagctggtattggcaaaattgcctttgttactacccctccagcttccccgtaatgattttaaggagaattttatgggtatgaatgttggctcaaataatgatgacgatgtaatgctagaggtgaacatgacaccgcttattgatgtcatgctggtactcatcattatgtttattattactatacctgcaccaaacaatgcgattaatattaatttgccaaatggcacaccgccaccaacaaatgaaaagccacctgaagtcattgatgtaagaattgatgcagcaggcaaagtattttggaataaccaacaggtttctgaccgcaaggcactagagactttatttcaaggtgttgtcgcccaaaaagatcaagaccaaatcaaacttaaaccagaccaaatggctgaatataaaaatgtagcgatggtcatggctacggcacagcgtttaggtgtaactaaaattgggattgtgagtagtaattaatatcgcttttaactttagttaattccatttccttcaacgctaacttgaattctcagttagcgttttttaaaaagaaatacccaactctaaaataatatcaccacattcatcatattccccagtttctataaaattcatttttttataaagttttccagcaatattattagaagatttatacatcgttcggattcgtttagccccttttgaagtcatttcatcaattgccatttgcaacgctaaggtaccataacctttagcttgatgatctttgccaatcataaatcgaaacaaccaaaataatgtctcatcagggggatcaatttccacacaatacattaagaacccaaccacctcatcattaaaacagatcactcttgggcaatagtgttcctcaactttagactcagcaatagaatatacatttggtgcgacatagtccttttgagattcatctaataataattttgcgcatagaagccaattctcacgatcaagattttttaagttaatcaaacttgaaatcctttatttataaattcacgccttatctataagcacaaaatataccgaaaataaaaaagcctccgaagaggctttttttataataggttaaaattagtcacctgtataaccttttaattttaaacgagccgcatgtagtaatggctcagtataaccagaaggctgttcacaacctttaaagataagatctgaagctgcttggaaagcaatattagtttcaaagttagctgccattggtttatacaatggatcattcgcattttgttcatcaacaatttttgccatgcgtttaagcacttcttcaacttgttcacgagtcacgataccgtgacgtaaccagttggcaacatgttgagaagaaatacgtaatgttgcacggtcttccattaagcccacattgttaatatccggaacttttgaacaacctacacctaagtccacccaacgaacaacgtaacctaaaataccttggcagttattttcaagttcgttattaatttcttctgctgaccagtttgtatcagttgcaaatggaggagttaacaagtcatctaatgacaacatttcttcagcttttaactgatcttgacgtgcttttacatttacttggtggtaatgcatcgcatgaagtacagcaccagttggtgatggaacccaagcacatgaagcaccagcatttggatgagcagctttagttgccaacatatctttcatgctatctggttttggccacatgcctttaccaatctgtgctttaccttgtaaaccacatttcaaaccgattgcaacgttacgattttcgtaagcagcaatccatttttgtgttttaacagcttctttacgaacaactggtgcagcttccatagaggtatggatttcgtcacccgtacggtccatgaacccagtgttaataaagattgtgcgatctttagcagcagcaatacagtttttcaggtttacagatgtacggcgttcttcatccataataccgatttttaaagacttcgctggtaatcctagggcttgctcagcacgctcaaataactcaacagcaaaagcaacttcttcaggaccatgcatttttggtttaacaatatacatagaccctttacgagagtttttattttcgttttcactacggatgtcagcaattgacaacaatggtgttaccaacgcatccataataccttcgaaaatttcttcgccatcaactaaaattgctggattcgtcattaaatgacctacgttacgaagtaacataagtgaacgaccatgaagttttgttgtgccaccgatcaaatttttaatttcacggtctttgttcaaagcgcgaacaattgttttaccatttttttcgatagattcttgaagagtgcccttcatcaaacctaaccagttacgataaccttcaaccttttcttctgcatcaacagctgctacagagtcttcaagatcctgaattgttgtaaccgcagcttcaagtgttagatctttaacacccgctaaatcagtttggccaattgggctattcgcatcaatttcaataatgacatgtaggccattactcaaaagaacaacttctgaagggttcgcttcttcaccattgaaacccacaaactgagcttcatgagctaagccagttttagtaccatcttttaaagtcacaacgagtttattctgctcgattgcatatttagttgcatcagcatgtgagccttgcgcaagcgggaaaatttcatttaagaagtttttagcaaactcaataactttcgcaccacgtacagggttatatccttttcctttttctgcaccaccttcttctgaaattacatcaaaaccgtaaagtgcatcatataaagaaccccagcgcgcatttgctgcatttaagcaataacgtgcattacgtacaggtactactaattgtgggcctgctaacaatgcaatttcttcatctacgttttcagtagtaatttggaagtcttcaacttctggtaataaataaccaatttcagttaaaaatgctttgtaagcacctaattcaaatttattgttgcggtgccattcatcaatttttgcttgtaattcatcacgcttagccaataatgctttattctttggactaaggtcgacaacaacttgctcaaagttcttccagtaagtttcactatctaaaccagaacctggtaaagcttcattttcgataaaatcgtaaagttctttagcaatcgctaacttgcctttttgaatacgtgcagtcattgtctttcctgaagttgctactttttataccaagagaatcctagtataccgatttaaattaagctgaatactaatatcacattcctaaatagtaagcattttcccttgcataactattgacaaagataaatttttctatataggaaaatattaaaattctaactaggattcccaacaatttattcaatatttaaagatactgaaactagactttttgttaacagacaaaaaatttcactatcttgttttttctaaagcgtatttagttatatcaaactttgcacaatgaaaaagtactatttcgctaaatttatctttttttgttgtaaaaaaagcgctcaatctagagcgctcttcatatctgatttcttaagaagttttagtcgcatcaatatgtcgatgttcagaatgcaaatactcatctgactgcatttctaataaacgtgaacgagtacgctcaatttcaaaagccaatttctcgccttgatagatatcaataatactatcttgagaggttaaaagtagtttcactccacgatcataaaattcatcgactagataaataaaacgacgtgtgccttcagacaagaagtctgttaagtgaggaacattgctgaccaaaaccgtattataaatattggcaatttcaataaagtctgctggactacggggctttaagcaaagttcagaaaactcacaccataaaacatcttccgtatgccctagggtttcaacaacacggttattgatcacaatcggttcatgagaatttgtttgagtatgagttaaagcagtataacgctctgatatccagctttgagcttcattacctaatggtgatttaaacaattgagcctgttttaaaacacgtaaacggtaatccactcctgcatctacatttaaaacgacacagttctttttaaccatttcaattgtaggaataaaacgatcacggtgaatcccgtttttatataaaccgtctggtgcaatgtttgaagttgcaatgagtgttacaccacgaacaaataacttttggaataagtcactcaaaatcattgcatcagttacgttcgagacaaaaaactcatcgaaacaaataacgacagcatctttataaatttgatcagccacgatatcgagtggattacgttggccagaaagtttatttaactctttatgaacatgttgcataaagtgatgaaaatgcatacgtgttttacggcgaaatggtacagactcataaaattggtccataagccaagttttgccacgtcctacaccgccccacatatatacaccttttggagatgtttggcggcggaaacgacggaaagcttttttagaagctttataacgatttaaaagttctttccatacacgatctaattcttgcactgcctgtgcttgtgcctcatctgccataaactggcctgaagccaatgcctcagcatagcgctctgctggggaagacggagtaaatgcagtactatgagaagattttaaatttaacatatcattttatttcaattttaactgaagagagtatagcgaacattttgtccgaccacattagcttttagcatcaagagttacactcagtaaaactcttttccatattgccgaggactctgtccaaaccatcttttaaatgcatgattaaaagcggcaggttcagaataaccaagtgcttctgcaataacttctattgaatactctttatattccataagtttaagcgccttattcttaataatctgttcacgaatttgtttataactcgtattaagctgctgcaattgatgccttaatgtcctttcaggcattttcaaagcaaaagcggtttccgccatgctcgggataattccttgttgtagctctaaataatcttgcacatattgaataataggcggtatttgatgatcttgttcatttaatctttctatttctttaatacatttagcctcatagatacgatgagtaataatatctgctgaaggaatttttatttccagcacattcttacttaggctaaatgctgcatgtgtagaattaaaatgtagatcatctccataatatgcgtaatattgagtaacggtatctggatcagagggtttcggaaatggtaaatctatacgcatatcaggcatttttaagcccatcatggtataaatatcctgaataaacttataagtgcccgaaatttcgcattgggcacggagtaaaccgatttctgtttttaaatcgaccggtaaatagtttaaaatgatgtgattttcagtttcttgtaagctcaaagtaccaaataaatgcgtaagcttttgatactgtatgcctttttctaaggctgtttgtatatcatggctggtcacaagtaacatgagtaaaggaccataacctgccaatgcgtaatgttgtccaataaataatcctttctctgggtcaacattctcactaataatttgctgtatatcccattccaaactgtcatgaattgttgagcttgggtccaaggaatctactttaatacctatatctgccaaacgtgagtcgacatcaatgcccgcattgcgcattccttgaattaaatagattaaaccaagtgccgatcgtttcattcttttatcaatttccctagactgaaatgttttactataaagaagtgataaaattaattgccgaatctatcaattttcacgtcgatacaatcatgtttaaactgtttaaaaaacgttagtcttgcctgcaatcctctttaccgcatatgcagggtttccaatgctaaacgcaaaacaacatgctattcaaaaaactaaaatcgcaattattggtgctggattcggtggccttgccatggctattcgtctgttacaaagccaacaatcagatttttttattttagaaaaatctaatgatgtcggtggaacttggcgtgaaaaccgctatccaggagctgcgtgtgatgttcaatcacatatgtactctttgtcttttgcacctaaaactgactggtcaaaacgttatgcagaagctcctgaaattttcgattatatccaagatataaccaatcaatatcaaattaaaaactactgtaagtttaaccatgaggttactcatgtacagtatgatgaaatgcgccatgtatggtcactagattttgcaaaccaaccttctctcgaagcacaatttgtagtttttgcatcaggtccgctacatattccacaaatccctcatattcaaggtattgaaaagttcaagggtaaagtttttcactcttcccaatgggaacatgactacagtctagaaggtaaatcagttgcttccatcggtactggtggtagtgcaattcaatatgttccagaaatcgcaaaagacgttaagcaattatatgtattccaacgtacagcagcttgggttatcccacgagatgagcgtaaatactctaatttgagcaaagctctatttaaaaaatcaaacttctatcgacaaattcatcgcagccgcctttattggagtaatgaatctcgcgttgttcctatagttcagccgcaaatcatgaaatatgggcaaaaattagctgaggcatttatacgtttccaagttaaagataaagatttagccaagaaacttacaccagactttgtgatgggctgtaaacgcattcttatttcaaataaatacttccctacttttaaccgtaaaaacgttgaattagtgaccgagggtattcaagaaattaaagagaacagtattattacaaaggatggaaaagaaagaccaattgactgtttaatctatggaactggttttgttaccgatccacgtatttatttaaaacattttacatgtattggtcgcaatcaaattgaattgaaacaggcttggaaaaacggtgcagaaagttattatggaattatgaccaagaattttcctaacctatttcaactggtcgggccaaataccgttttaggtcataattcgattatatttatgattgagtcacaagttaattatattttacagcttattgatctagttgaaaaatctggacagcacgctatagaaattaaaccggaagttcaggattccttcaatgaaagaatacaaacacaacttcaaggtactgtatggcaagctggtgggtgtagcagctggtatcaagctgccgatggaaagaacttttctttatggccaacttatacatggaaatattggctagacactcgtaaagttaatcctaaagattatttgttattaaataaatgctcacagagctatgcagcataatatgttcaatacataatagataggttgataacaatctatctattattatatgcagtccattagtctcattattcaaatttttcttgtattagcatttggttattttctaggtcctaaactttcactaaatattcggcattttatttttaaaatcctgccttatttttcttatattttactaaccagtgtagctttagaactaacactcgcccttgaccaaattgataatccctcaactatacttccacctgctctattaattgcattaaccacttctcttggttctttttttacttgcttattcgcttatacaatttttgataaagaaagtgttaaagggaaaatttcgcttcaactttttatgaatgcattaaaaaatattgccaaggcatttttagctttaacaataggcgtgattttaggcattcttcttacccaattacatacccatattccctttaatagttggtatttactattactttttatttttttaatcggaatcgaacttgcttttactcattttaatcgtacatggttaagttggaaaattcttattgtacctttggccgcctttataggctcgtgcttagctgggcttctcaactattccttacttggtcatgagtttacacttaatgaaatattagctttgggccaaggctatggttggtattcaatgtcaggtattttatttacacagctacattcagctgagttaggtgggattgccttgctcacagatctatttagagagatagttgcaattttactcatgtatacaatgggttggcggtttccacgtccagcgatttcaagtgctggcgctacctcaatggatgtaacattagcaatggtaaaacagtcatgtggcacacattatgtaccacatgccatgatgagcggcttactcttaagtctactcgctccacttttaattactgtgtttttaaacttttaagcaattgaagcaagaatcgatttcaacatttcagttggattttctgctttagtaatcggacgaccaataactaaatgtgtagacccatcaagcattgcctgtttcggagttacaatacgtttttggtcatctgcattactaccctcaggacgtattcccggagtaactaaagagaaatcttgtccgattaactcacgaagaattttagcttcttgagcagaacaaactacaccatctaaaccactttctttagtaagtttcgccaatcttttaacttgttctacaggttcaatatctaacccgatatcttttaaatcttcacgccccatagaagttaaaactgttaccgcaattaattgtgtttgataattacctgcttttaaacgctccacacaggtttccatcattttacggccacctgatgcatgtacgttaaccatccatacacctaagtctgcggcagcacatacagcttgagccgtcgtatttggaatatcatggaattttaaatctaggaaaacttcgaaattttcttcttgaagtttttttacaacagatgggccttcatgagtaaaaagctctttacctacttttacgcgacataaagtaggatcaagttgttcaacaatttttaaagcgtcatattggcttttagcgtccaacgcaacaatgatactcaagagactttcttccatcacataaaatcagcgctattataatagacaagtcagccagtaataaagaaatctattgaaccaagttcttaaatgaggaaatagtgattttaaactagaaggataatgaggaatatagaagggaaaatactactctttatgactagataaagagtagtaccaaaattataaaggagtagaatttttatcttgcggataaatatctacaacagttttttcgtgtcttacatttgcagctgcttctgctgcagccaattgagcactttgaatttgttcttttctcaaatgatcaatatctttgcgaagacgtttgatttcccagcttttttggaaaactcggaaaacttgtacacctaataaaagcccaactacaattccaagcgctaaggtaagcaacaataataaacctaaacgcattgcaggaacttgagtaaataataaatcaacaggaagttctgttgggttctgcaaaacaagtgctaaagaatagccaaatacaataatgagtaatgcaattagaatataacgcataggcaccccacttatgagttttatttattttccagattcattcactgcatcacggagtgctttacctggtttaaaatgtggaacagccttcgctgcaacatctactgacttacctgttttagggttacgaccaactctaggttcacggtggtgtaatgcaaagctaccaaaaccacggatttcaatacgattgtcagacgaaagagcttcgatcatttggtcaatcataatcttaaccgcttcttccactaatggttcagccaagtgtggattttttagcgcaatgcgttcaatcaaatcagacttattaagagcttcagtagtcatctacgacctcgttatttattactactctaagtcgtttgataataacctgtttaaatacaaaacggtagcgcagtatgttgaatactacgctaccgtttacagtaatttgtataaaaagtacaatttcgttacatgaaactgtactttgttaacttattacttcatttgtgctttgatcaagtcaccaatagtcttaggaccattgtcttgagaagctgatgctgtacgcaagttagcaactgcttctttctcttcagcttcatctttcgctttgatagacaagttgatagagcgagatttacggtcaacgttgatgattttcgcttcaacttcttgaccaacttctaagaatttagttgcgtcttcaacgcggtcacggttgatttcagaagctttaagagtagcttctacttcgtcagctaacttaacagttgcgccacgagcatcaactgcagttacagtacctttaactaaagcaccacgttcgttagcagctaagaaatcattgaacggatcgctgttcaattgcttgataccaaggctgatacggttaccttcagcgtctacagacaagataactgcttcaacagtgtcacctttcttgtaacgacggatagcttcttcgccttgttcgttccaagaaatatcagacaagtgaactagaccgtcaataccgccatttaaaccaatgaagataccaaagtcagtgatagacttgattgtacctgaaactttttcgcctttctcatgagacttagcaaactcttcccatgggttagcacgagtttgtttgataccaaggctgatacgacgacgttcttcgtcaacttcaagaaccataacgtcaacttcgtcaccgatctgaacaactttagatgggtggatgtttttgttagtatggtccatttcagaaacgtgtactaaaccttcaacgccttcagcgatttcagcgaaacaaccgtagtcagttaagttagtaacacgtgctttaacgatagaacctttagggtaacggctcatgatcgctaaccatggatcttcacctaattgtttaaggcctaaagatacgcggttacgttcacggtcaaacttaagtactttaacagtaacttcttgaccaacttcaacaacttctgaagggtgcttgatacgcttccaagccatatctgtgatatgaagaagaccatcaataccaccaagatcaacgaatgcaccgtaatcagtaaggtttttgatagtacctgtaactgtttgaccttcttcaagttgagcaagtaatgcttcacggtcagcagaagattcagcttccataacagcacgacgagatacaacaacgttgttacgtttagcatcaagcttgattactttaaactctaactctttaccttcaaggtgagttgtgtcacggataggacgagtgtcaactaatgagcctggtaagaacgcacgaacaggaccgatgtcaacagtgaaaccgcctttaactttaccagagataacaccagtaacgatttcgccatcttcaaagattttttcaagtttagtccaagtttcagcacgtttagctttttcacgtgataaaactgtttgacccataccgttgtcaagagcttcaacaactacgtcaacagtatcgccaacctgaacttcaagttcacgttgttcatttaaaaattcagcacggtcaacaatgccttcagatttaaggccagtgtcaacagtaacccagtcactatcgatgtttacaacaacaccttggatgactgcacccttttcaacgttgaggtttaattcactttcttcaaagagggctgcaaaagattcggtcatgatatacctgataaagtcagcggtcttggatcagacaaggccggtttagttaagtatcaacatagtctttatagactgatcaagctatgcgtcaactgataatcttagttgctaacagtacggctattgacgtaatcaaccatcaacttaaatacttgatcgatcgttaattccgaactatcaataatataagcatctgcggctggcttgagaggagctacttctcgctccatgtctcttttgtcacgcgcttgtatattagctaaaatgtcgtttattttagcatctagccccataccctgcaactgttttactcttcgctcagcacgcgactcagctgaagcagtcaaataaattttagcattagcttccgggaaaattgatgttgccatatctcggccatctgcaactaatcccggagtttgtgcaaatgctctttggcgctcaaaaagtgcttgtctgagctctggtattgctgcaactttagatgcatattctccaactcgctctgtacggatagtttgggttacatcttccccatcgaggaaaactaatgttccctctgccgaggtttcaaacttaatattaagctgacgagcatagttaacacactcatctaaatggctatctaatttttccaataaatcatgtttatgtaatgacaaccctaacaaacgatataaggcacccgaatcaagtaaatgaaattgataatacgcagcaagtttcgccgctaatgttcctttacccgaaccactcggaccatcaatagtaataatttgaactgtcattgaactctcacgaagaagcaaatgctttagctaatctcgaaaagcctagtgtaatcgctagttttagctgtgcaagaattaatttacttacaacaggagcttttgcggttaattcgatacgatacgtaaccaaagtaatataaggagtaatttctgagaactcgattcgacctaaatggtgtttcactagaggattatcaatcagtttatattcaatacgtttgttttcttcgagatgcgtgatttcttctttaagtggtttaatcacgccaaaccccatacgacgaacagaacccactccatcaggtctttcaggatctgccgaatctttaacacgcacaacttgtagtggagcaaatgcagtgttgtaagctgcatgtttagaaagcaggttaaagacatcactaagaggagcattaaattctttttgtatagtaattacattacgcatgaaagttccttatttaaataaatcatgtcaatgaaacggcgttagtgtgccataacctcatgacattttttaatcatttaaggacgttttttgttgtttctcttgtttcttttgttcacgtctttgcttaaaaaaaagacttaactgttgagcacatttttcatgtaaatatccatgctcaaaagtaaatttatggttgtaataaccattttctaataattgacgtgcactcacgagtgagccagctttaggttctgttgttccaaatacgacatgtttaattcttgcatgtactaatgctcccacacacattgtgcacggctcaagcgtaacgtacaaagtcgcatcttcaggtaaacgataatttttcaatgactcacaagccgcacgaatagcttgaatttctgcatgagccgtaggatcagataaaccaattggagcattaaaaccagctccaattaacttgttttgactcacgattacagctcctacaggaatttccccctgcttggctgctaattcagcttgctcgtaagcaagctgcatccaatactcatcactaaatttagacattattgattatgacactacgccatattgtctaagtaatgcattccagctatcaatcgtcgtgatcggtggatcatcggccaaaatacctcgtaatgtaaggtcttcacatgctttccattctggcgataaatctttatcgactaaacgagcacgtacgccttccacaaagtcaggatggcgaattttccattcagagatttgcgcttctaaatcaaaaacttcatcccaagaatgaacttgtttaccccattgccataacaaccaagtaattgctgccgtactaggcgagcccttttgtaagttttcactcgcttgacgcaaccagtcactgcttgcatctcgcaagctgacgatcgcttgatagtcttgttcaaagcttgaaccacggcaaacactatgtataacgtctaacgaattttgtaatggccctgctgcaaccgggcgatgcaaactatttaaagtatcatcaatcgcacggaaatcacctgccggatagtgagcccaattaatattgagtactttctgtagaacattatcacgttgcgcttcacaaatatgcgtcgcccaaccaatgctatatgccccagcagccgtcataatagaacctgtcaaaccggtaaataaaccaatttgcccacggtcagcaaggaaacggcttgctccaacatcagggtataaaccaatattaatttcaggcatagccaaacgtgaatatggtgtaaccaaacggaaaggtgcagccataaacaagcctaaaccaccacccattacatagccttcgccccaaacaacaaccggtttagcatagttatgtaacaataaatccaaagcatattcttgctggaaaaatttatttgcggtttctacttcctgattaattaccagctgacgtaatttgcgtacatctccacccgcacaaaatgcttttggtgtagtcgagtccaaccaaattgcttttacttgctcatcatcacggaagtcttcaaatacacgtaatagagccgttacgattgattcatctaaagcgtgtaatgatttaggtcgattcaaacgtacaatacgccaaccatttttcgcttcttcaactaccaaatccggatgatagctatttacattgggagagttcatcatgcgtccaattgccagtctatgggctcaatgccatgttgtttcaaatattgatttgttttggaaaacactttgcatccaaagaaaccaccacgattagccgcaagtggcgatggatgtgcagcagttaaaaccaagtgtttttctctatttatacgttgtcctttacgttgtgcataagcaccccataaaataaaaacaatgtgttcacgttgttcatttaaaacatcaattactgcgtcagtaaactcttcccaaccttgtttttgatgtgatgtgggttgccctgcttctacagtaagtacactgtttaataaaagtacgccttgctcagcccatttggttaaatcaccatgacgagaaactggcacacctaaatctgtgtgtagttcatgaaaaatattacgtaaagatggtggtaatgcaacccctctttgaaccgagaaacttaagccatttgcctgatttggaccatgatatggatcttgccctaatataacgactttcacatgatctaacggcgtaatatttaaagcattaaatatttgtttacttggtggatatatggttttttgagcctgtttttgttgaaacaaaaagtctcttaaactatccatataaggactcagtaaaaatggagttaatgatcttttccagctttcttctaattgaactttactgagtttgtcttgctgttgctcagttaattgcattaatgtcatcctagatcaattttcatttctacaaacaaaaggaagttaacttacacttctacttgtaagttaacatgcggattatgaaacttaatcccttgttttaaattttcatacatatctggatcagcccattcggattggacttgttctgaaaaaataattccctcaaggtttaacagccccatttgttcattttgaatatcttcaagaaaactttgggcataacctgtatcggtttcatgaacaatcactgaatagacttcaacatcaccttccccattttgggtaacagtagattgtaatacttgctgggccaaatagaagaagattcgagaaaattgctcagcagatggcgaaactggtaaagagatccaacgcgcgctaaaagtcttacaagcatcaatatattgcggatcatctttttcccagaaacaaatcgcatgatcaaagctatcgaaaaggtccttaattacgccttttaacagcccaaaatcatataccatttgtccatgatctaatttcgaagctttaagtaataactcgactttataactatgcccatgaatagatcgcttacaacgatccgatgtacagttacgtacaacgtgtgcattttcaaacttaaataacttacgaattaacatgtgccaaatcgatcattccttctaagaacattattataaagcaaaagataaaaacttcgcaccacttttcaaatagaaacaattagcaaaaagtatgataagagatgtgaagaaattttgaagatattgattttttactttaaatactgcctatacagaagtatgacctcatcccttttattaataagtttcaagtattacagactcagaaaaaatatcaataaatttatttagttaaatggagccatgcttcttgaataaacatatacttgtttatcttttctcattaaagcactagtaaactgtcgcttcctattatttagaacaacttcaatctgagcttgaaagaagctggatttaacatcaataagactatttacttgatttttcctttgactatcaaccgctgaaaaagcattcaattgccacaattcatctacattttggaagaactttaaattttgttggcgtgtttgcaattctttttcaatagctcctatatctaatttttcatccatacttgctaaaaccaatggcgaagcagtattaatatttaacttcgaattttctggtaaagcagaaatatatggagcaattagatcaaatttttttccatcaaagcctctcactagctttaactcttcaatacggtggaatttagtattcgcagccatgtaacctggatccaaaccttcataataactactttctgcccccattggcccagttggctcatcatttggatcttgccaatcaatcacagcttggcttaattcggctggtaatcccacacgtaccaataaacgttcaaaccaacttttagcatcttcatttacaatgccttccccgttagttagattatttaaattaaatttaccagactcatcaagcaaacgaccagatactgaaccctcttcaatagaaaacggcggcataggttgtgcccatgtctcttttaaatgatctactccacctgcattatttgcatcttgaattaataattctgaaaaaaaggcttctgcactttttgcataaagcaaagattgattttggcgcattaagtaggctgtattttccatagtattattttgatgcttggcaatagaagccgctaaaattgtagccaaggcaaccataataagtatagtcagtaaagcaacaccctgttggtgtttgtaactaacggccattatgaattaccttcctgcgaaagcgataagtcaccctgatttaagctataaatccactcataatttacaccagcgactgtaagttggatttttatccctttcggtaatttttttaactcattaggtttcgttggatcaatattaacctcgggccattttgtgacttcttgcggagtcaaaaccataatctgatattggtcgacttgacttaacaaagtactcgataaaggttgctctctgttcgaagtattcaaatttgtatatttaagacgatataatttttttggtctgcatcataacgatattcaattcgttcaaatggtgataagccttgttttaaaggatccgttacgcctgctttgctaaaacgtaaaatttgattatcgatttctaaagctggatgaagttgaccaccttggtttgcggataaagggataatctgcaaagtatcacgaagaatttgttgataagcatcttgtaattcaaataaatgcacttcatgttcggcattacgatcacgaactttgagcaagtaatcgaaaattttccaccccaataaagataaaaccgcaaagatagcgatcgcgactaacaattcaaccaaagtaaatcctgaggcgcgagttaatcgagcactgctcgatcgtgctgcaaggcgagaatcaatgcttcggatgtgaatatatttattttttatcattattttgctttcactggataattaaaaaagaccatatgagtaatgccattttgtacttttcccttatccggatcatacaaactcacttgtaaatcaattttttgaacattcgggctaatagtagattgagctgacttatcaatttgccaagtttcaccttgggaagttacttgcttactctgggttccttgcaaccattcttgattaatctccatcatagcaacttcattcattgctacaaattgagctttggttcgcaaaattgcatttgaagtggactgcgtgtactgcattgccactttagttaaagcgacagctgcgactgcaaagattgccaaagcaaccataacttctaagagggtaaagcctttagatttcatttattttacccaagtgatctatttgtatttccgaaccaatcggtttttgttctaaataaaattgtattttaacggttttagcttctccattgccaaaccagatgagttgaggcgtttgtcctccaatcaaatctgtatttttagctttagaataattctggtcatccaagggttgtactgaaaaagaaacatgagcaggaagttgccgtgttttaaactcagtatatttctgccaacggttttttatatcttgtacttgtaaagtgctttgatcgtgatattcataaagttcataagaaaatggtgagacatctgtctcaccatgagtttctaaagccaatacacgtgattgatcgagcgattctttattaattttctgcaaatcgagtaaaaataactctctcgcctgcattgcctttttttggtcgacgccacctatatttaatacaaccagagaagtcataattgtcataatcacaatgactaccatcacttctatgagggtaaagcctttttgtgattgaaatggtagattcgatttcatatcgacctattaagcgtactgttcaactgcttgtttgggtaaggctaatgcctggtcaatgtatgctactcgcaaagtatctcttgaacccaaataacgttgataaaagcttgaattcagaattgcagcagctccatgagtgagtgaccagattgaagccaagtaatctcgtgtagtcatatgactctggattgactctaaatagtgatcagtcatacgaataataatacgtaagcgctgctttctcacttggtaaagttcattaaaaagatggtgtacaccttgggcagtaattgaaagcttttcttcaatttggtgaaacagcactgttctttctggatggtgcaagtgatgcaacataaagaaagctaaatgttctggaaaagccttttcagtatcttgaaccatttctagtaacatgcgctcattacgaataattaatagcatgtacaattcatctttactttgaaagtgcttgtacaaagtaccttttgccaaatcaagctcagcagccagcacatcaagtgtcattccggcttcgccattttctaacaacaactgttccgcaacttgaaatattaatgcttctcttgctcggaactgagcttgacggtccatcttcacgcaattactctctttatatagtttctataagttaaatcgctttaagtaaattttcaaaattttgcgaggtgattcttgcaatttcctcaactggtttatcatatacctcacttagtgctttcgctacataaggtacatattttggttcattcgttttaccacgatatggtactggagccaaataaggactatctgtttcaatcaaaagccgatctaaaggaacttgcttggctacatctcgtagatcttgagcatttttaaatgaaacaattcctgaaaaggaaatatagtaaccgcagtccaatacagcttttgctgtttcccagtcctcagtaaaacagtgcaaaataccatgtgtagattgttcagctcgaataatatccaccgtatcatgttttgctgaacgtgtatgaacaactactggttttttaacatttttagaggcttgaatatgacgagcaaaacaatctttttgctcgttaataaagtcagtgctgtggtaatagtctaaacctgtttcacctaaagcccataccttttctgattgagccaattcagtcaaatactcagtcgttgctcgagccatagtatcaacatcctcacacggatgtacgcctaccgtataccccacatcttcatgacgctttgcgatttcagctaaagcaatatgatcatcaaggtcaactgaaattgccataaacttagaaacaccttctgctcgcgcagcagcaagtgcgagatctaaatcaccgttataaggcgttaaatctaacattgttaaatggcaatgggtatcaacaaacactgttctttcctatctgcttacatggtataacttgggcgatctaaagacatactaccagctaaaatccgctcagcttcagctttatagtaaattcctttatcaccactcaattgaattgcgaaaccttgcggtttaaatccactttgcttatgtgaaatccaaactactttaccagttaaaggaattttttgtgattgttctggtaacgtagctaaaataaaaatttcctgacccatcttcactttttgcttcgatggtacaaacaagcccccaccttgtacatatcccatataacttgcttgcaatgttgctctatctggaatattgacctgaataattccacccatttgtggttgcattagtgttccccttaaacgttcattaattttataaaaagttgatctatgatgagttgtgtttgtacattctgttcaaccaatcttttagattgctgtaattcctcataaagactgaataagctttctaaattatagttttgcgccaattgatggaactgtaaatcaatatttttctgtggttgattgagcttgacacaaattaaatcccctaacaagtattcaagaagcatcataaaatcactaaagttgagttctttttgccatttagccgaataaaataaaggcatatttttttgatttacaactttagtccaatcttctaaaaaagactgtcttttagcaaaccaatcactagtcgcaatttcaactgcttgcaaaggcatatcattagaaaggcctagcaataattcaggtggtacagatgctatttcagctaaatgttcatttaaataagatgtggcttctgtatatgaaatacggtctaaagcaaaatgctgtaagcgacttcgaatggttgccggtaatttcaaataatgatcggccaacaagattaaaacgacgcgttcacctggctcttctaaggtttttagcagcgcatttgatgacgcaagatttaaagcttcagctggctcaataacaacaacacgccatccctcaccagtttgttgtacaaatggcaataaatctcgaattttttctattttaatttttgcattttgttttttattttcttcatctgtcgtgatatgaacatagtttggatgcgtatctgattttaaccattgacagctactacattcaccacaagcaccttgaggttgtttatttaaacaaagtacccacgctaagaaatgcttagcaaaagcatgtttaccacaaccttgtttaccataaaataataagccatgcccaatattaggaaaacgtgttgttaacgtttcccacattgtctgttgccacggataaaccttagaagtcacattctgattcattaaattaacgcttactcaaaagactcaacaggcatattatttaaacgatcaagatctgcttgagtgtcaacacctggtggtaaattcgcttctgctacagcaatagcaatacggtgtccattttctaaaacacgcaattgctcaagactctcgagcttttcaagtttacccatttcccatgtaacatattcttgtaataagctcacacgataagcatataaacctaaatgacgaaatgcttggctatgtaaagttggttcagcttgtttagcactatctcgatcataaggaatagttgcacgactaaaatataatgcttcattttgtttagacatgactacttttacgatactatcacgctgaaattcatccaacgcatgaataggctcacataatgtagacattgaacagtttggcttatcaaccaaaagctttgcaacttgctgaacaagctgggctggcagtaatggctcatcgccttgtacgtttacaataatgtcatcagcatcccatcctttaatacgagcaacttcacttaaacgatctgttcccgatggatggtctgcacttgttaaaacaacatcaacgccctctgcacgacatatttcagcgatacgttcatcgtccgttgctacacataggtcatcgaaaccttcaactttttttgcttgatctactactcgtaaaatcataggacgatcatgaataagtaacaatggcttacctggcaaacgcgaacttgagaagcgtgctggaatgacgatatgtttcattttttcttcctaagatatttgaatatcaagcttttgcaattgttgatttaaaatctgatagcactctgtagacaaaacagctttaacaggtacgacccagatagaacgtttaaagtctggatgtttttcaagtaatggtaaaaatttaacagcatctttttctgttgtaatgatcggcaaatcatcattaaaaatgagatcatcaatactgtaatcatgatgatcacgaaaagcatgctcttgaaattgtttcacccctaaacctttaagtgtttggtaaaagcgctgaggaaaaccaatgccgactactgcatggtaattattttgaatattgaatgataattcagttgccgaagaaggattcaacaagtaaggctggcctgcatcaagatgcatatgcaatgtagttgttggtgtgaaaatatgctcgattaccgtactagtttttaaacgttccgcaggttcacgtaaatatccttctggtaataactttctatttccaaggccacgattttgatcaagtacgatccattctatttggcgacctaatgcccaatgttgcaacccatcatcactaataattaaatctagtttagtcgatgctaataataactcgattgctacttgtctattgggtcctactgccataggtacgccagttgactgtacaatcaaagcaggttcatctcctgcttcagctgcttgactggccgatgttaccaacataggaaaagggccagctccaccatagcctctactaattacccctacctttacattatgctgctttagataattgaccagctctattaataatggagtttttccacttccccccaccgtaatattgccaattaccatgaccggcacaggtgcggtataaacttttttaaagcctgaactataaagataacgatttagtaaaaacccagcacgatacaagcaagacaaaggacgtaaaacaatcaaccaacttgattgcttattccatgcattttggatcagctgggctaaagacatacttaatggtcctcaaaattacgctgatgtaattgataataagcaccgtgcttagcaagtaattcttgatgagtaccttgttcaacaatttgtccgcggtccatcacaacaatacgatccgcattttcaatggttgatagacggtgagcaatcacaatcgttgtacgatcttgcatagcttcatcaaatgcttgttgaataaagtgttcagattcattatcaagcgcacttgtcgcctcatccaaaatcagaattggggcatttttcaaaattgcacgagcaattgcaatacgttgacgttgaccacccgataaatttagaccttgagcacccaaaacagtatcgtagccatttggtaagttcataataaagtcgtgggcataagcagcctttgctgcagctattacgtcttcatcacttgcattatgtaactgaccataagcaatgttttcacgtacagttcggttaaacaaaacaacttgctgatttaccattgcaatttgtgtacgcaaacttgaaagctcaatatcacgtattggcaaatcatctaaataaatttgaccacttgagacttcttggaaacgtaccaacatgttcactaaagaagttttaccagcaccagagcgccctaccaatgcaacagtttcgcctggacgaatatctaaagaaaagtctttaatcgcttgcgtaccgtcagcatagttaagtacaacatggtcaaaacgaattgcaccttgcaactgcggtttaagttcaccactattttgctcttcaggtaaatctaataattcaaaaactgagtgtgcagctgctaaaccccgctgtaacttttcattcacatctgtcaagtttttaacaggctttgaaagtaaccctgctgccgtaatatatgcaacaaactcaccagcagttgtattccctaaaatttgtggtcttaatgctaaccatacaattagagccattgcacaagccattaccacttgaacaacaggactatttaggttttgcacaatcaccatttttaaaccacgttttaagttttcttccgatgacttatagaaacgctcttgttctgactcttcaccagcgaaacttttaacaactgcattaccattaatactttcttgcactacatggttaacatcacccatagtatcctgaacttgcatcgagagtttgcgcattctttttgaagctttacgcaccaaaatcccaattacaggtaagaacaccataatacaaattgttaaacgccaattggtatagaacaaataacctaacaaccccaacgtaatcatgccatctcgaacaatggtttttaatgattcagatgaagcagctgtaagttgctcgacgttatacataattttggcagtaatatgacccgaagagttttcgagataatattgagccggcagtcttagaagttttgcataaacttcttggcgaatactaaaaaccaaactgcgcgagatcacagccgtatagtaccctcccataaataggccaaggccacggaagaataccaataaaatgattaataaagggaaccaatctagatccgctctactggcactttgaattgcatcaataataaatttaatgagcttagcaacagaaacctccgtcgctgagttcataccgaacccgataagaactaataaggccacgccccaataaggttttaaataggatatgagacgtaaataaaccttaaaatcttgattcactcagaaaaacctctagaaggaactttggtactaatattgatgttaacaaaaccgagttgtcctgctacatccataacacgaataacatcctgatgggatgcttttgcatcagcagcaatgataaacataaagtcacgtcgctcttgagcaatttgcttaattgcagtgctcaaatcagccacatctttggtagatagcgcctgaccattcacagcgtaatgtccgctagagtctaccacgacttcaattttatgatcgtactgttttggtggaacaccttgtgcatctggtaaagttaaattgatgcgacttggctgattaaaagtggtagataacaataaaaacactagaatgaacaataaacagtcaatcataggtgttaaattgatatgaatgtcttcaacttgagaacgtttaaacttcatattgtgatctacccatcaaccaacgcggcgatgttcttgcatgactgaagaacgtttgtaaaacaatgaggcatgaaatagcgtagattgttgctctaactcagcaatataatcttgcactactctttgaaaatatcgataggaaataagtgcaggaattgcaatgagcataccaactgctgttgtgatcaaagccttggaaataccgggaatcattaaactaggactacctgccgaaccaaaatcaataaccaaaaaagactcaataattcccacaactgttccaagcagccctagtagaggcgctatagcacttaaagtccctaagaagttaatatttttttctaaataagaaatttcttgagaagccatagcttccatttgtgctcgcgcaaattgttcgccatgttcctgatgctcaaaaccagcttttagaatattgcccaatgccgtgctttgcgcattagtatcctgctccaaatttgttatgacaacagaaatatctgcactgccatcattcattagtactttaggtaaaacttgtgaacgtcttaaacgtacaaaacgctcaatactaattgcgacggttaaaattgaacacaaaattaaaggcagcattaaccagccgcccgctttcacaagttcccacatattttcttccccaagaatataaattagaaatatatgacctaacttagaattaatctggtaaacaaatattcaaaataccatctaactcatcgagtgaatgatagtgaataacaagcttacctttacctttctggttatgatcaattttaacattggcaccaaaacgttctgataatttctgagttagttgctcaatgtctggtgcaacaggagctttttccttttcctgtttaggctcgctccaatcgcgtactaactgctcagtctgacgaacagataatcctttttcaattacaatttttgcaacttcaagttgttctttgccctttaaagttaagatggcacgagcatgccccatatcaagctggccttgctgcataaactccttaatatcatcagccaagctcaacagacgtaataaattacttaccgttgttcttgctttaccgactgtatcagcaatttcttgatggcttaaaccgaattcatcatggaatcgttgtagcgccaacgcttgatcaatcgggtttaaatcttgacgttgaatattttcaataagtgctaaagcaatagcaacctgatcatttaaatcacgaacaattgcagggatttccgttaagccagcaatttgagctgcgcgccaacgacgctcacctgcaataatttcgtaaggatgagcttcatcatctacaggacgaataacaattggctgcattaccccatgtttttcaatagaggatgccaactcttgcaaatcatgctcatggataaaacgacgtggttgatattcacctcgtttcaacaacttcacatcaatttgctttaactgaccatgatcaagcgcttgagcttctagttgtaatttttctttttgaattgaaccaagtaatgcatctaaaccacgacctttcgccaatccgcgttttttgatgctcatactttacttcctttcttcactttacttttctttaacatctcagccgcaagatttaagtatgcaactgcacctttcgaacttttttcaaaataaatcactggcaaaccatgtgctggagcttcagccaaacgaacattacgtggaatcacagtgtcgtagagtttcttaccaaaatattgttccaactcagcagatacatcgcgagttaaggcattacgcgcatcatacatggtgcgtaaaacaccaataatttccaaatctggatttaacgctttttgaatacgatcgatcgtttgagttaaatctgccaaaccttctaatgcatagtattcgcattgcattggaatgattacaccatctactgcagctaaagcattcacggtaattaaacttaagctaggcgcgcaatcaacaataatgtaatcgaatgagtcccgaatttcattcaaagcattctttaaaatgaactcacgaccttcttgctcggcaatggcaagctcgacaccagaaagttcacggtttgaacccaaaactttatatccaacctcagctttttgaattgccgtttcgattggcacttcacccaataacacatccgtaattgaataaagtagatcattcttttgaataccagaccccatcgtagcattaccttgcgaatctatatcgacaagtagcacacgttttttcaatacagctagtgacgctgcaagatttactgcagtcgttgttttaccaacaccacccttttggtttgcaatcgcaataatttgagccatggtaaccctaatactttttatttaaattcgttgaagtaaaagtaaatgacgttgttcatcaagtctcggtacatgcagttcaatcactttacatgaaaattcctgcttaagctcttccatttcttcaactggaatcagtcctttcatcgcggcaattatactctgctcatgtaaatatggacgtgcagcctcaacaaaatctgttaatgatgcaaatgcacgacttgttattacatcaaattggccaagttcatcaattgtatcttgattttcaacacgcgtttgcacagctattacgtttttaagcttaaggtcagcaataaactgtttcaaaaaacgaattttcttaccatttgaatcaagcaatacacaagagcgttctggctgacataaagcaatgatcatgcccggcatgccaccacctgtacctacatcgagcaaacgacctgctggcaaatctttcaaaatacttaggctatccaacaaatgctttactaacatttctttaggatcacgaatcgctgttagattataagctttgttccaaagtaccaaagcatcttgatacttcaacaataatgtcaaagcttcatcgctaagcgataaacctaatttttgactaccctgttgtaactcttgaaaaaacggatgcataaacagataacatctaagtaaaatttaaaacaaagtatacccatttatgcatcgtggaacactagttaacgattagcgattacgcagttaatcgtagaagccttcacgaatttgcaaatctagctccattaaacgctcaggcgttcccacatctacccatgcacctttaagcttttcaccagatattttttgattgtgcatcgcttgcttcaacaatggggctaacggacgtttaccagcttccaatccatcaaaaagcttaggatggataacagatacaccactaaaagtgaggttctcgcccttcacatcttgatcaaatgtaaaagcgcgtccatttaataatgtaaagtcgccatcaggatgctgtttaggattatcaactaatacaagatgtgccaaatcatcatttaacttaatatggcgtagagcttcaaaatccattgtagtccatacatctccattcaccagaatgaaaggatctgttccaagcagtggcaaagcattaataattccaccagcggtttccagcccttcttcttctcgtgtccaacggatatccacaccaaattgagagccatcacctaaactactgatgagtttgtcggctaaccacgcagaattgatgactatgtcggtcacaccaattttcttaagtttttcaatatgccacacaataagtggcttaccacctacctcaagcagaggctttggtgtatatagcgtgagtggacgcatacgattgcccaagccagcagctaaaatcattgctttcattatgctgcaacctcataagggccatatttttcaataaatttaggcattaccgaactgtgaataaatgccatgaagtcatcaagctcatgatagccacggctctcttcaagtaaataccacatgactcgtggtaaatccttcaaataaccagacttaccatctcgctcaaacaaacggacaaaaatacctaaaattttgatatggcgttgaattgccattaaatcagcatcacgtttaaattggtcaaagcttcggttttgtttagcagatgctggtaaaagctcatagaacactttaaaccattgataaacacgctcagcattccactgcacgtatgcatcacgtgtaatcgagattaaatcatatgtatcagcaccaataaccgcgtcttggaagtcaattactcccaattcttcttcattagcaattttcattaaattacggctatgaaaatcacgatgtacaataacttgcggttgagctaatgctgcctgagccaagaaatcaaatgcatcatcaatagttttcttttgctcagctgttggatggatatcgagtgacggtaacatccaatctgttaacaactgcatttccgataaaagcttttcataagaataagccgggaaatgttcagccccattaatcgattgcaaatgaataagctgtttaaaactctgttcataatattgatcaactgtttcatcgtttaacaatgtagacagcagcacatcaccaaagtcttctaacaataaaaaaccttgatttaaatcttttgcaacgatctgaggtacccgaaccccatgccctgcaaaaaactcgtcaatggtcacaaacggaacacagtcttctttttcaggaggtgcatccataagcatatacgttttattttgtaactggatgcgagcataacgtcgaaagcttgcatcccctgctaaataagcgatctgaaattgatcattttcaagaacagatgtaagccatgtatgtatcaattgttcacgttgtgtattcatttgcaataaaatctaaaacaagctgagatttttgaagggttaagtgtagccacttataaactttttctctatgatgcgacaataattaattgtgaattagcatacttggttaatgagacaatgaagcatcagtttaaatttaatcctttagcgaccgctatttttacgctcttatgtagtggctccatacaatcaagttatgctgagtcagctggtgttgtctccaacatagacaataatcaacttaaggcgagtattaaggaagcctatccagggcaggaattctttcaacaatattatgttgataaatctacccctgaggcgcaattgcgcaataataaatatttgagttcagcattctgccaaggaacttggattacaccaattaatcctgaaactaaagcgttagatgcagataaggctacttcagttgtaacggctgattatgggcactacaaccctgccggcgactctgtgttggaaggaaacgtggtgatagatcaagaaggccgtacagttcgtgccgataaagtcaccattgataaaactcaaacatttgcacatgcacaaggccgagtacagttagctcaaggcggcttactctctcaaagtgatgaaattgattacaatctaaagactcaaaccggaaatttagataatagtttttatatttctgaacaacaacatgcccatggtcatgctgggaagatcgagagaacctctccgaatgtaatggttctcaatgatgcgacttacacaacctgtccgccaggccagaaaccaggttggaaaattcaagccaacaaaattgagttgaaccaagaaactgggcgcggtgttacgcgcggaacaaaactatatgtaaaagatgttccagttctagcagttccctactttaacttcccgatcgatgaccgccgtactacaggtatcctcaacccacaatttggtttctcaaacgatggtggtattgaactttcggttcctgtttatttaaaccttgcgcctaattacgatgcaacaattacgccacgttacttagcagatcgtggggcaatgttacaaggtgaattccgatatttgacggatgggtttggtgccggacagatttggggcggcattttgccatctgataaagaatatgatgataaagaccgtaaagatttccattttttacataattgggatatcaacgaccaatggtctaccaaccttgaatataactacgcatcagataaagactacttctctgatttagatagtagccctatctctaaaacagatcttaacttacgtagagcttgggaacttaactatcaacatggtattccgggtttaaaagcacagcttaaagtcgaagatttccagacccttgacccagaagtaaaagacgtcaataaaccatacgcccgcttacctcaatttttattaaattatgtcactggtaatccactaggactacaatacgaatttaataacgatactgcttattttaagaaatcaattaacgatgattctgcacaagaaagtagcggtacgcgtatttataaccagtttgcaacacgttataactatcgaacaccagcagcctttgtaattcctgagctttccgtacgttctattcaaaccttctatgacaaggacagtatcgcctctcaaggtttagacggcggttctgaaaacaaatcagtcgttgtgccacaatttacattggacactggattgaattttgaacgtgagggcaaatatttacaaacacttacaccacgcgccttctatgcctatgcgccatacaaaaatcaagatggctacccaaactttgactcaaccactgcgtcaattagttacgatcagttatttaacccttaccgcttctatggacatgaccgccttgaagacaataactttttatcgttaggtgtaagctatagtctttttgacacagtaggcttagagcgtttacgcgcaagtgtgggccaaagctattattttgaagatcgccgcgtcaccttgaaacaacaagatgaaattgatactgaacgtaatacaggtcctgttgttagcttatcaagtcaacttaatcaaaactttaccattgctgccaactcggcatggatgtcaaatggtgataatgcacagcgtgattttcaactttactatacaggcgataaaggaaatctatataacttaggctatttctatcgtaaagatattccaggacgccaagatacatacgaccaagttgttgcatcgtttatacaaccaattaaagacaattggcgtattatggggcacgtacaatatgacatggacaatgatgttgcccgtgaattattactaggtgttaattatgaatcgtgttgctggggcatttctgtctatggccgttcatactataacgatctagacgatccaaaatctccagatgttagtgaaaagcgcgcgatcatggccgaaattacactcaaaggtttaggtggtttaaacaataaactcgcgtctttacttgaaaatcgcgttttaggttttaacaaaattaatcaatcttggacacaacgttaatgaagacaaaacatcttaaacagttttttaaagcgacaacccttgctgtattaatatcttcatcaatgcatagttttgcccaacctactgatgaagttgtggcaattgtggacaatagcgtaattttaaaaagtgaccttgaacaaggaatggctgaagcagctcacgaattgcaagcacaaaaaaaagaagttccacctcaacaatacttacaatttcaagtattagaccagctcatcttacgtcaagcacaacttgaacaagttaaaaaatatggcatcaaacctgatgagaaaagtctaaatgaggctgtacttaaagttgcaagtcaatcaggtagcaaaagcctagaagcctttcaacaaaaattagatgcgattgcacctggaacttatgaaaacttacgtagccgtattgctgaagatttagcaattaatcgtctgcgtcaacagcaagttatgtctcgcattaaaatcagtgatcaagatgtagataacttcttgaagtcaccacaaggacaagctgctttaggtaatcaagcccatgtgattcatatgcgaatttccggagacaaccctcaagaagttcaaaatgtagcaaaagaagttcgttcacaacttgctcaaagcaatgatttaaacgctcttaaaaagctttcaactgcgactgtaaaagttgaaggtgcagatatgggattccgtcctctttctgatataccggctgaacttgctgctcgtattactccactgcaagacggtcaaacaactgacttaatttctgtacgcgatggtgtacatgttctaaaacttttagaacgtaagcaaaatgaacagaaagcattagtaccgcaatatcagacacgccatattcttattcaaccttccgaagtggtaagccctgaaaatgcgaaacaaataattgatagcatttacaagcgattaaaagcgggtgaagatttcgctattcttgctgcaacttattcaaacgatacaggttcagcacgtgatggcggcagtctaggttgggttacgccaggtatgatggttcctgagtttgataaaaaaatgcaggaaattcctgtaggtgaaattagtgaacctttccaaactcaattcggctggcatatcttacaagtgacagacaaacgcgaaaaagatatgacacatgaatatcaagagcgtatggcacgtcaaattttaggtgagcgtcaatttaacactgaaattgatagctggttgcgtgaagtacgtgcaaatgcttatgtagaaattaaagatccaagcctcgacaaaaagaacttacaaaaataagttaatcttttgtcgttaaaacctgtgttgatcacaggtttttttataaacaaaacccagccattaaaaaaccggttatatgaataaccggtttctataaatcagaccctaacgggaattatttataacgatcaaccattttctctaaagaaattgggcgaatcttgtcagcattaccagctgtaccgaaagcttcataacgatcgatacaaatttgtttcattgaatcgacagttttagcgaaatacttacgtgggtcaaattcagctgggttttccgccatgaaacgacgaattgcacctgttgaagctaaacgcaagtcagtatcgatattgattttacgtacaccatgtttaatcgcttctacaagctgttcaactggtacaccataagtctcaccaatattaccaccaaactcgttaattacttttaaccattcttgtggtacagagcttgaaccgtgcattacaaggtgagtatttggcaatgccgcatgaatttctttaatacggtcaattgctaaaatatcccctgtaggtggacgtgtaaatttataagcaccgtgtgaagtacctacagcaattgctaaagcatcaacatttgtatcagcaacgaattgttttgcttcttcaacagaggttaaaagctgagaatggtctagtacaccttctgcacccacaccgtcttcttctccagccatacctgtttcaaggctacctaagcaaccgatctcaccttcaacagatacaccacaagcatgagccattgctaccacttgacgagttacatctacgttgtaatcgtaagttgtaggagttttaccatcagcgcccaatgaaccgtccatcatcactgagctaaaaccaagttgaatagaacgttggcatacatcagggcttgtaccatggtcttggtgcattaccactggaatgtgtggccattcttcaattgcagccaaaataagatggcgtaagaatggagcgcctgcatatttgcgagctccagcagatgcctgaacaattacaggtgaattggtagcatctgcggcaagcataattgcacgcatttgttctaagttatttacgttaaatgctggtacgccgtagttatgttccgcagcgtgatccaagagctggcgcattgaaatgagtgccataatatcctcccaggtagtgcggcttattctaccttgtcatttatttcaattcagcaacaaatcacagtatttcaaaaaaaatccctgcatttgcagggaatttttaacaaaaaacaacaaattaatgcgtttctgaagcagccgtctcgctagatgcactaccttcaaccacatctgtattcttttcatctaaaactggcttatcaagcgcatcgattgcagcttgttgttccggagttactttgtcagcaacagctgtagatgccgcatcttggcctgcttgagccgcctcttcttttttcgcacaagcagtcaacatcattgggacaattaacaaagcagcaaaggtaagttttaaattcatcactattttccacaattggtgatttagtactcattatattatttcaggaatatgacaatttaatgacttatcaatgaaaaagggattgataactcaatcccttcttatttcaatataacagtttttaagcacgctcaagtaaaacggcaactgctggcaatgtttttccttcaacaaattcaaggaatgcaccaccacctgttgaaatataaccaatttgatcagctacattatatttatcaatcgcagctaaagtatcaccaccaccagcaattgagaatgcatcagattgtgcaactgcaagagaaagtgctttagtaccttcaccaaattgatcaacttcaaatacaccaacaggaccattccaaagaatcgtttttgaagttgttaaaatatttgcaaatgctttagctgtttcaggaccaacatccaaaatcatatcatttgctgtgacatcttcaactttcttaattactgcttgcgctgctgccaaagaacctaagaaatcttcgaagttaatttgtgaagcatcagctacaactacatctgtaggaagtggaacacttactttagcagcaatttgttttgcagtttcaaccaagtcagcttcatataaagatttaccaacattgtaaccagcagccgccaagaaagtatttgcaataccaccgcctacaatcagttggtcacaaataccagataatgaatttaacacatcaagttttgttgaaactttagaaccagcgacaattgccaccattggtttttcaggtgtttgcattgcacggccaagtgcatctaattcagcagccaataatgggcctgccgctgcaacaggtgcaaaacgtgctacaccttctgtagaagcttctgcacggtgagcagtaccaaaagcatccattacaaacacatcacatagagctgcatatttttgtgcaagttcaggattatttttcttttcacccggattaaaacgaacattttcaagcaaaacaacttgtcctgcttcaacttcaaccccatttaaataatcagtaaataatttaacttcttgacctaatgcttcagttaaatatgcagccactggtgcaagtgattgttcaggctttggctcaccttccacaggacgacctaaatgtgaaaataccattacagcagcgcctttttctaaagcagcttttattgttggaagtgcggcacgtaaacgagcatcgctagtaatcacaccatttttaacaggaacgtttaaatcttcacgaataaggacacgtttacctgctaaattaaggtcagtcatgcgctgaaaattcatgtaaagctctctttatgattttaaaaacgcgccaattttaaatgattacatcaaaaaaggttagtttttttgcataaaagctgtagaaagccaaagttttgattatgatagaggtagtcatctaatatttcatccattatgtctattcatccagatccacaaatcaatcgtttaaatgttttaggtgaacccttagcaagctgttgttttgaccctattactggctacttccggaatggtttttgccatacagccgtaacagatcttggacaacatacggtgtgcgcccaaatgacttctgagtttttaaatttttcacaaaaagtcggaaacgatctgatcactcctctaccagaagcaggcttccctggcctacagccgggagacttctggtgcatttgtgtaactcgttgggtagaagcttatcaagctggtcaagcaccccctgttaaacttcatgcttgtcatcaggctgtattgagctatgttccattagatgtattaatggaatttgcagtgtaatgaaacaacccaaaattattttggcatcaagcagtcagacacgtaaagatttaatgaatcgtttaggaatcgaatatatctgcattagtccagatattgacgagagtccttgtggtgaaacgcatgccgatgatttagcaaaaagactggcatttactaaagcacaagtaattgcacaaaaaaatcgtgaagcaattgtaattggatcagatcaggttgcatggcgagagcatgctcctcatgattttattggcaaacccttaacaattgaaaatgccaaagctcaattagcagcaaactctggccgaatagtcttttttagtactgctttaagtgtgcagtgccttgaaaaaagttttgaacatacgcttgttgagcattatcaagttaagtttcgcaatttaagcgcgcctgaaatcgaaagatacgtcgacttagatctgcccttagaatgcgcaggaagttttaagtgtgaaagtctcggcattagtttatttgaaaaaatgataggccaagaccaaaccacgctgatgggtttacccatgattcagctttgtcagattttaagacaactcaatctccaaattccttaatatttattagcttatttataggttatttccatgacagaagctttaaccgttttaggcggtattactgctgaacagtttttaacagagtattggcagaaaaaaccattacttgtacgtaatgctatgcctgaaattgtgggtatgttagagccgaatgatgtaaaagaactcgctttagaagaccatgtaactgctcgtcttatccgtcaaaaagataaaaatccaaatgaatggcatgtaaaatcgtctcccttaactaaaggtgattttcaaaaactaccaaagttatggacacttttggttcaagcagtagaccattattcatttgatatagctgaattgtggaagaaatttccttttattccacaatggcgccgtgatgacattatggtgtcttatgcccccaaaggtggttcagtaggaaaacattttgacttttatgatgtttttcttgttcaaggatatggtcatcgtcgctggcaactcggccaaatgtgtgatgcaaacactgaatttgtacctaatcaacctttaaagttgctatcagaaatagatgttcattttgatgaagtattagctcctggcgacttattatatgttccacctggattatcacattatggcgttgccgaagatgattgtttaactttctcctttggtttccgtatgcctaatatttcaggcatgatcgatagaattagcgatcaatttgctactgatgaattacttcaaaatcctgttgtcgatattacccgtaagaatcctcctcaaattggggaaataaacacggaagagttggcttatttaagagatttagtgctagctcaattgaaaaattcaacagtacttgatgctgccctcatgtcttacatgagcgagcctaaatatccagacaatattccagaaccagatgaaatagaggttgaagacctaaatgctattttgtcagaagggtatgagctgctactcgaacctgcttcgcgtctactttatacagaacaaaatggcattttaaagttttggggtaatggagaagaattaccgattgtggaatcttttgccacccaactcaaatcgattgccgatgggaaaagcattcctttcaatagtgagcttaacaatacagatattttagaaaacattgttcaattattgaataattcaattcttatgttgttacctcctgcagagtaatactaactaaatatataaaaaggagaaattataaaatttctccttttttcttttataaatacatgtttaaatataccaatctttaaatcaaagttataaaggcccacttatagtaaaaaccaccttaccaaatcaaagaattaactactaaacatagctattaaattataaaaaaattaatgcttagcattgagttttgttcttttattatttttaaaaaacctatttttttctatcaataacagtcaatacaatgtaaaatttcgcgttcgtgctttttatttgtacactcgacctttaggctaatagcaaaatatttgtgtgaggctactaaaatatgtcaaaaaaagatgacattattaccactgctttaagactttttaattcatatagttataattctataggggtagatcgtatcatcagtgaatctggtgtagcgaaaatgacattttataaatactttccttcaaaagagaaacttattgaagagtgtttattattaagaaactcacttttacaaaattctcttactgcggcaatctctaaagaagacgaaaccaacccactagctcgtattaaagccatctttttatggtattcagattggtttaatagtgaagactttaatggttgcatgttccaaaaagccttagaagaagtattaaaacaatacccgtcaacacatcaaccagcaactttatacaaaatctggttaacacaattaatgcaagatcttcttattcaatatgaaattgaagagtctcgacctttggcattgcttttagtcaatattttagagggtatgaccattcaagctcaagttgagcatggttcagtaaaaattgatgactattggaagcgtgtagagaaactcattgaatttgaaaaaattgcacattaaaaaataaagcgtgatattattcttcttatcttgttgaatcttcttcttattcatcacgctgcgtctgaaagtcattctagcttagagtttgacattttttaaattatcatcccaaactagaatatacagacctgtctgtacatggtcgattataactttagaaaataaaaacacaatctttttttcttgcccttttatatataaatcagatttaactattgatagagagaaaaatagaatttattttctttgactttgtttcatttatacttaacaattacgcttctcacacaaagcaacacttttgacacaaaacaaatacaaattcttgttttaccttaataatgttatatatttatcaattacacttataaaccttttcaacaaaaacaattggattgattagttttgctacattcattttcttaagatcaatctatactatgccggccatattgatataggtataaagtatgaaagatggactccaaattgaagaaatgaaaaatgcggcggattcagtcgtaggaacattaaaatctttagctaacactgaccgtttattaattttatgtcacttagcccatgaggagttaaatgtctctcaaattgaagagaaaacacaaatcacccaacccaccctttcacaacaattgatgatgctacgtaaaagtgatgtcgtttcaacacgtcgtgatggcaagcaaatcttctattcaatcaaggatgataagatgcattcaattttaaatatgctttaccagttatattgcatagaataactgctctaaacttataaaattataataatattaatgtattcctgaaatatgcgatttttcaacttggtagctggtaattatccgagcaaagaggattgaaaattcgcgtagtttttctagcattccaatctattaaaaaacaaaaataacctctcctatttcttttttatatcttttctccctcttcactaatttttatggcaaataataagaacttaagcgttactggctgtaatataagcaaaacatcagataccaaactttaaccaatcaattttctttatttaaaaacaaatacttaatattaccaaaccttataaaactgatgacttgatataaaaaagcttaagattcacatcacttacgtataaaatactcagcttgttcaacctttagccatgaataggttaataaggcctttatatgcttgaattcttttctcgattaagcttagtcactaaaattattatcgccattattttagggataggcgtcgcactattatttccaaccgttacgccgtacttaagcttgtttggtgaactatttattaaagcattaaaatcggttgctcctattttagtctttgtactggttctctcatctattgccaacttccaagtcggtcatagtgcaaatttacgcccagtattactactctatgtagtaggtatgttattagctgcttttagtgctgtgatcgctagcttatcttttcctagtacgctttatctcaacactgtttctcataataatttgcaagcgcctggtagtctcgctgatatattaaaaaatctgcttttaagttttattgcaaaccctgttcaagcaatcagtgaagcgaactttattggtattcttgcgtgggcaattggtctcggcttagcaatgcgtcatagctcggatacaaccaaacaagtaatgcaggatgtttcacatgctgtaagcgctattattcataaagttattgcgtttgcacctgttggtattttcggtctagttgcagtaacttttgcagatgctggactagcaacacttgaaagttatgcacaattacttgctgttctattaggaacaatgctgtttgttgctctagtgattaacccaattctagtaggtttaacaattcgcggtaatccctacccattagtatttaaatgcttaaaagaaagtggtatcacagcgttctttacacgcagctcagcagctaatattcctgtaaaccttgatttagctgaacgtttaggcgtaaatccttcaactgcgagcgtttcaattcctttaggtgctactgttaacatggctggtgcagcagttacgattactgtacttactttagcaactgtgcatacgttaggaattcatgttgatttggcaacaatgattattttatctattgtagctacaatatcagcatgtggtgcatctggtgttgcaggtggttccctacttctaattccagtcgcatgtagcttatttggtatttcatcagaaattgcaatgcaagttgttgcagtaggtatgattattagtgtattacaagattcaacagaaacggcgcttaactcatctaccgatgttttatttacagccgcagttgatattcgctcaagacaaaactcatagagaacatgccatttcaaagtttaccaaactggttccaacttggcgccttcttactggcaataaatgccggaatgattaatgtattagggcttatcacccttttacatcaatcggtgtcgcatatgactggtaatgtcagtatgctagccatgagtttggtaaactggcagtttgaacacatcatatatttagtactagttatattatgttatgtatgtggatcattttacagtggttttattctaggcaatagccatttcaaattaggccgccggtatggccttcctttaagtctagtttcactatttatttttctctgttggttactgctgccttattttccaaaatatggactattatgggcttgtgtcgccatggggctacaaaatgcaatggtaagtcactataaaggaaccattattaggactactcacttatcgggtgtcttaacagatcttgggcttgcacttggttatatagcacgaggtttaaaagtagagaatcgccgcattattttgcatctacttatttttataggttttctatctggcggtataattgctgctttagttcacccttatttaaaattgcaatcatttttgcttccagcaattttaagcttaactctcagtatttcgtattgggcagtttactttcatagttcttcctcttcaaattcggattaagtcatggttaaaaatgccttacaagctcagttactcaaagctggtttagttgacaataaaaaagcgaaaaaacttaccaaacaagctcagcatgagcagcgtactggtcaaagcaatgaagcagaaattaaagctaatattgaaaaagctcaaaaagagaaacaagcaaaagatcaagctttgaatctagaaaagcagcagcaactcgaagaaaaagcattaaaggcttcaatcattcaaatgatcaagcaacacaaaattgtagattttgccggagatgtggcttatcaatttattgacgagaataagattaaaaaggtttacctatctcagcaagtttataatgcacttgttacaggcagtttagtgattgctaaagatcaagatcaatatgcttaccttcctaaagccttagctgaaaaaattgatcaaaaaatgaaaggatttattttgatcaataatgctgagaaaaatgaacaaactactgatgaagaagatccatatgcagcatatgtaattccggatgacttaatgtggtaactgttatgagcctttatcaacattcggataaaggctcatactgcttaaaataaatattaatattttatcatttattaaaaaaatttataaaaattacattcaagccaaattcattcaccacttcatctattattatcgatataatgaataaaacattttttgtctttacgatgccttttaggcttcttcccgattccaaatttatgtcttgactaaatcatgtcagttttagccaaagatatacaacataaactttgacgtgtatccacacacccaacagatcaataccttaattaagtttgatctaactgactttattgcaaattaaattgcgaaattttactaaagtagctgatgtataaaggtagtcattcatgctgaagtggtttgaaaaacttgtagatccttatccaaccaaaggtttggatgagcccttaccaacacgctttttcccatttgtttggcaagctactgaaggtgtgcgtccatatttattgctacttattatatgtacagctggtgcagctagctttgaagccctgctcttttcaaaaattgggcaacttgtagattggcttagtaatagtcagcctgaaagtttcttaagccaacatgcgtcaaacatccttattctcattagcgtgttatttgctaacattttatttgttaatattcaatctattataaaacatcaaattttatatagtacttttccaatgcgcttacgttggcgcttccataaccttttattaaaacaaagcctagactttttccataatgattttgctggtcgactttctgcaaaggtcatgcaaacagctttagcagtccgtgaattctggattattttaggcgacatgttggcttacgtcagcatttactttattaccgtaagtattgttcttggtgcaatctcacccacattacttattccacttatggtttggttagggttatttttattaagcgcatggttctttattccacgtttaagcaaagtatcacaacaacaagccgatgcacgcgctgtaatgactggtcgtgtaactgacgcctacactaatattcaaactgtaaagctctttgctcatgctgggcgtgaaagccaatatgcaaaagcgtcaatgaaagagtttatgaccacagtctatgcgcaaatgcgtctaggtactctttttgaagttagcattaatttactgtctgctgttttatttgttggggtaattggtaccgcagtttggttatggactcaaggtttagcagcgttaggcgtaattgctgctactactgccatgattttaaaacttaatagcatggctgagtttatgatgtggcatatgtcagcattatttgaaaatgttggtaccattcaagatggcatgcaaacacttggtaaaaaaatcaatattcaagacaagccagatgcaaaaccacttgcagtcacacaaggtgagatcgtatttaaagatgtgacctttgcttataacaataaaaatgtcatcgatcactttaatctacacattaaagcaggtgaaaagattggtatcgttggccgttcaggtgcaggtaaatctaccctcatccaattactgttacacttttatcatcttaaagaaggtgcaattttaattgatgggcagaatattgaagatgttacgcaagatagtttgagagcaaatattgctttagttactcaagacacttctctactacatcgctcagttgccgaaaatattaaatatggccgtccagatgcaactgatcaagatatgcaaagtgccgtgcataaggcaaaagcagctgaatttattcctcaacttgtcgacttaaaagggcgttcaggttatgaagcacaagttggtgaacgtggtgtcaaactgtcaggtggtcaaagacaacgtatcgctattgcgcgtgttttcttaaaagatgcaccaattttaatcttagatgaagcaactagcgctttagactcagaagttgaagcagctattcagtctagtttaaatgacctaatggtagataaaacagttattgcaattgctcaccgtttgtctaccattgctcaaatggaccgtttaattgttcttgatgaaggtaaaattgcagagcaaggtactcatgaagaattaattgctaaaaatggtatatacgcacaattatggaaacgtcaaacgggcggttttcttattgagcaaaaagtagtacagggtcaagattaatgctttatttagaagatttaaaaattggtgatcgttttatcagtcgtgagtatgaaattacacttgatgaaattaaacaatttgcaagccactatgaccctcaacctttccatacagatgaagagttagccaaagaagatccaatctttaaaggtattgccgctagcggatggcatacctcggcaattactatgcgcttatggactgaatgcatgcccattcatggtggactagtaggctcagaatctagtctacgttggccacgccctactcggcctggtgaccgtattcatgttgaagctgaaatttccgccattacgccatccaaaacaaaattggatcgtggtattgtaagctacgttacgcaagccttaaatcagcatggggatgttttacttatttcaacgacaaaaatcgttgtctttaaaaagaatgtttaatgaatcgttgatatgattgtctaacagtttttataaactcaaattatatttcatgacaagatgtgtaagaaatgcacgtagaaaattgatgagagcaacggaacgcatatgaaaattacctcagctcgtcaagatcaaggtattccaggagtctatggcttattgctattagatgtagtttcacgttggggatacaacgatgaaacattatttgctccttttcatcttactagtgagcaattggccgatcctgaatatcgtatttcaacacccgtagcaaatgagctagtcaaacatgccttaaatcttaccggtgaaagtacactgggttatcatattggcactcaaatgcgtatttccattcacggatttattggctacgcgataatgacagcaaaagatattacagaagcgattgctctcgctgcccgttttatccaattacgcttaccttttttacaattatatttttctactttcgggccaaaagccacattacaattgcaatgtgatattgagttagaacctcttcgtactgaaatcgttttaggtttaactattggtattatgaccatggctaaagcgattacgggtattgaagatttagcgggtgatgttgatttagactttccagaaccggaaggttttgataaatataagagcaaactaagcagtactattcggtttaaccagcctcatctaatctctagctttgacaaaaaatatttaggttttaagttagttaatgccgatccaatcgcaagtcaaatcgctattaaccaatgtgaagcggaactatctgctttaggcgaacgccgccgtctagccatgcgtgtacgtgatattttaagtaattctgaacaacattacttaagcatagaaaatgtagcagaatatttacatatgtcagatcgtaccttaaagcgacaattggcagccgaaggtacttcattttctactttagtagatgaagttcgatatcgtcatgcgacctctctgctttcgcgtacagattatagtcttgaacaaattgcagatgaacttggttactcggatgtcgcaaatttcagtcgcgcttttaaacgctggagcggtcgcagtccgagcaactggcgcaaagacccctatttataatgttattaaaatattggacacaagcttaaggagttgtcatgaaccatccttcagaattgaagtatgcacgtacacatgagtgggtaaaaattgaaggagaccttgttattacagggattaccgaccatgcacaagatgagcttggagatttggtctatgttgaaactcctgaagtgggtagccaagtaacagctggcgaacaagccggagttgttgaatcagttaaaactgcttctgatattcatgcccctgtctctggtacagtagtagaagttaatactgatcttgaagatgatccggattttgtaaatgaagatccatatggcaaaggctggatttataaaatcaaaccagacaatattgcagatgttgaaaaacttttaacaaatgcagagtatgaagctggtctataatatagatatagttttaataaaaaaaccagtttagatttaactggttttttatatatgtatagatcagatttaaaaaccaaattcatgaatgggtcattcatatgacaaaacttgtggtattttccggcgccggtatgagtgcagaaagtggaattagtactttccgcgatagtaatggtctctgggaaaattatgatatacaacaagttgccactcccgaagcgtgggaaagaaatccagctttagttcaacgcttttacaacgaacgtcgtaaaaatattttagaagcccagccgaacgaagctcatcaatatattgctaaactacaagaccattatgatgtacaagtcattacacaaaatattgatgatctacatgagcgtgctggaagccaaaatgtcttacatctacatggcaatattcgactagcgaaaagttctgggccagatgcacaatatacaactcaattttatgaagttaatggttggaagctcgatttagaacaggacttttgtctaaatggttacccgcttcgacctcatgtcgtttggtttggtgaagctgtacctgcttatgaagaagcaattcgtttagtacaaagtgctgatatttttattgtaatcgggtcaacattaagcgtatatccagttgccgccttggtccatgagattcctcattattccaaagcgtattatatagatccccaagcagatcattctcgtgttccacctcaatataaattattaaatatgacggctacagaaggtatgcacgagttatttaatcaattgacgagttaatattcctcttttgatattctttttttcttattaaaaccatttttttcgcgtaaaattgatgagaaattattcatctaaataataacttttcttaaaagacatcctgtcattattatttttgtaactaaaaaactgaatttaactcttagattttttaaattattagttttttaataagttttgatattattttaaattcataattaattgattttattaaactaaatttaatatgtaatcaaagttacacttgtttacataaagatacataaaatacatcacaaagataacagagcaaaaaaattcttttatggttgaatctcaacctcttgaaatgccgtacaagaaaacagcgacctggattaggttacaatcacggattatggatataaggacacacatccattatgagttattttgatcccaccctcatcatgtttatggtgtacatcgtagcaatggtacttatcggcttatttgcctaccgtgctacaagcgacttctctgattatattcttggtggtcgtagtttaggcagtttcgttactgcattatccgcaggcgcatcggacatgagtggttggttactcatgggcttaccaggagcgatttatctttctggtttatctgaagcgtggattgcaattggtctaattatcggtgcttggcttaactggttactggttgctggtcgattacgcgttcatactgaaatccaaaataatgcactcactctgccagattattttacaagtcgatttgatgaccagaaaaagatacttcgtattttctctgccgttattatcttggttttcttcgctatttactgtgcttcaggcatggtagctggtgcccgtttatttgaaaatttattcggtatgtcatataccaccgccatctggttaagtgctattgcaacaatcagttatgtttgtattggtggtttcttagcaattagctggactgatactttccaagcgggcttaatgatttttgccctcttgctcactccaatcgtgacttacctcgcaattggtgacacaactcagtttgtgacgcttattgaaactgctcgtccacatgcgtttaacatcatttctgatttaagtgtggtggccgttttatcttccatggcttggggcttaggctattttggccaaccgcatatccttgtacgtttcatggctgctgactctgtaaaatcaattcctgctgctcgccgtatcggtatgacctggatgattttatgtttagtcggtgctgtcggtgctggtttctttggtattgcttacttccagcaacaccctgaacttgcaggtgtggtaagtaaaaaccctgaaactgtatttatggaattgactaaaattttatttaatccatggattgtcggtatcattctagctgctattttagctgcggttatgagtacattaagctgtcagcttttggtatgttcaagtgcactaactgaagatttgtacaaaggcttcattcgtaaaaatgcatctcaaaaagagcttgtatgggttgggcgtatcatggttcttgcaattgccgttctagcaattgtgcttgcgggtaaccctgacagtaaagttcttggccttgttgcttatgcttgggctggttttggtgctgcatttggaccactcatcatcttgtcattgttctggaaacgtatgactttagaaggtgctttagcaggtatgatcgtaggtgctgttgttgtgatcggttggaaaaaccttttcgcaagcactggtgtttacgaaattattccaggctttatctgtgcatttatcagcatcatcgtagtaagcttgatcagcaaagcgccaaactctgatgtgactggtcgctttgagcaagcagataaactctataaagaaagtacataactcattgaaataaacaaaggggcttcggccccttatttatttttagttttgattttaatttttgaactatctttcacaacttgcatcacgggataactacgagtctcttttacaccgggtaattgccatagcacttgccctgcgatacgtcgaaactcctccatacttccactgcgtaatttaattaaaaaatcaaatcccccactgaccatatggcattcaacgatttctggataatgcacgactgcgtcaataaactcatctaaaacattaggtgtggttttatcaagtaagacttcgacaaaaaccaaaaaatttgcatttaacttaactggatttaatttagcttcataacctaagatgaattcatctttggtgagcttctgcactcgtgccataactgctgttggagacaaattgacgagttcagctaatctgctgttggaaatacgcccatctgtttgaagaatatccaaaatttttaaatcggtgcgatcaaggcttaataatgggccattcatctgaattttcctctaaaaaatgggcaaaatatagtgagttattcggtgtttcttctgtaatgataaattatctaaacctctctactcaagatgagtttacgagagctggttggcggaaatagatatgaacacaatggatacttttcatcaaatggataaatctcaccaaggctatatcaccgaattcaacgataaaagtgagtttgaacaacgcattaatacagcttggcgacgtgccgaacctgaagctgtagaagagctattacaagctgctgcggtatctgatgatttagatcataaaatttatgaccttgcatttaaccttgcccataatttacgtgaacgtaagacctcttcaggtaaagcaggtattgttcaagggttattacaagaattctctctttcttcacaagaaggcgtggctttgatgtgtcttgctgaagctttgcttcgtattccagacacagcaacacgtgatttgctcattcgcgataaaatcaatcaaggtaactggaaagaacatgttggccaaagcagcttaatgtttgtgaatgctgctgcatggggtctcatgttaactggtaagcttatggaaacaccaaagcaaaccagtctttcaagtgtacttactggccttttagcacgtagtggccgtggcattattcgtaaagcagttgacgttgcaatgcgtatgatgggtgaacagtttgtgactggtgaaaccatcgaagaagctgtcgaccacgcaaaagtacttgaggataaaggtttccgctattcttatgacatgttaggtgaagctgccttaaccgaccatgatgctgaacgttactttaatgattacacacaagccattcatgcaattggtaaagcgtctaatggtaaaggcgtatatgatggccctggtatctcaattaagctttcagctttacatccacgttaccaacgtgcgcaaattgaacgtgttcacaaagaactctacggcaaagtatttgaactcgctcgtttagctaaacagtacaatattggtttaaatatcgatgcagaagaatcagaacgtttagaaatttctcttgagttacttgagcgtctctgttttgagccagaacttgcgaactggaaaggcattggtttcgtaattcaagcttaccaaaagcgctgcttctttgtggttgattatattattgaccttgctaagcgtagccaaaagcgtctgatgatccgacttgtaaaaggcgcatattgggatagcgaaattaagaaagcacaaatcgaaggtatggatgactaccctgtcttcacgcgtaaagttcatactgatttgtcttatatcgcttgtgctaaaaaattacttgcagcaccagaatttatttatccgcaatttgcgacgcataatgctcaaactttagcaacgatctatcatttagcagatccaagcaaatattacgctggtcaatatgagttccaatgcttacatggtatgggcgagccgctttatgaacaagttgttggtccacgtgaacaaaataaattaggcgtgccatgccgtatttatgctccggttggtaaccacgaaacattgttagcttatttagtccgtcgtttacttgaaaatggcgcgaatacttcatttgttaaccgtattgccgataaaactcttaaagttgaagatcttatccagtctccaatttatgatattcgtaatgcagctaaacttgaaggttcggttggtttaaaacatccatcaattccactacctttagatatgtacggaacgcttcgtaaaaactctaaaggttatgacttagcaaatgacaccccacttgcagctttagatagcacagctcaagaattacgtaatcgtatttggcaaagccatccgttgttggctaatactgattctttagaacaaggtcattctgttgcaattacaaacccagcacaaaatgatgaaattgttggttatgtacaagaagctgatcttaagcatgtcgaaatcgctcttactgcagctgaacaaacccagtcagaatggtcaaatacacctaaggatcaacgcgctcaatacttaaaacgcgcagctgacctcatggaaagccgtattcaagagttgatggtattactttgccgtgaaagtggtaaaacttatgccaatgcgattgcagaagttcgtgaggctgtagatttcctacgttactatgcaacccaagttgaaaatcttcctgcaaatacagttattcagcctttaggtactgtactttgtattagcccatggaacttccctcttgcaattttctcaggtcaaattgctgcggcattagtcagtggtaactgtgttattgctaaaccagctgaacaaactccattgatcgcagcccaagcagttcagattttatgggaagctggtattccacatggtgctgtacagctacttcctggccgcggtgaaacagtaggtgctcagctcagccaagatagccgtatcgatggcattatgtttactggctcgactgaagttgcaaaaattttacagaagaccgttgcaaaacgtttatctgaaaatggtcaatctattccactcattgcagagactggcggtcaaaatgcaatgattgttgactcatctgctttaactgaacaagttgtattagatgttgtaagttctgcttttgatagcgcaggtcaacgctgctctgctttacgtattttatgtgtacaagaagacagtgctgcaaccgttattaaaatgcttaaaggtgcaatgcaacagttgatcgtaggtaaccctgcaattttaaaaactgacattggtcctgttattgatgacgaagcaaaacagacgattgaccagcacatccagaaaatgaaatcgaagggttatccggtacatcaattgatgtttggtgcaacaagccaaacagaattagataaaggaacttttgttgtgccaacagcaattgaacttcctaatcttgatgacttacaacgtgaagtttttggtccggttttacacatcattacctataagtatggtgaacttgagcaactcatctcaagaattaatgcgaaaggttatggtttaaccatgggtctgcatacccgtattgatgaaaccatccaaaccgtaattcaacatgctgaagtgggtaacctttatatcaaccgtaatattgttggtgctgttgttggcgtacaaccattcggtggtgaaggtttatctggtacaggccctaaagcgggtggccctctttacatgtatcgcttaatgcagcattgttctaacaaagtattagcaactccatttgcggtaaaaaatgagcaaaccgtttttgaaggctttacccgtgaggtttatcaaagcttacaaaactgggcgaaacaacatttaccacaagcaaaccgtgaaattgaaccttttggtgttggtaaattttatgagttacaaggccctactggggaaagtaaccaatatattattttgccgcgtcatcgtgttctttcaattgctgatacagaacaagatcaattgcatcagttacttgcaatctttgcagttggcagccaagctgctgtaatgccaaatagtccattattggcaaaacataaacaaacgttgccaaaagatgtacttgatgcgattactaccattaaaaacatcactacagatgattttgatgcagttttacatcatggcaaccgcgaagagatcttctcattacagcaagaaattgctagccgttctggcgcaattgttggtattactcatgttgaaccaaatgagtcgattccacttgaacgtttggtaattgaacgtgcaattagcgtaaatacagctgcggctggcggtaatgcaagcttaatgacaatgtctgaataattaagtaattttctaaaaagcccaaattacgatatttgggcttttttgtttaataaaataatctattcttaaatatataaattttatcaatttgagtttttaataatgattttttttgaaccagaacaataccaaaaaagatgcactcagctttttaacttataccgaaaacaaatttccgctctgctaccatctgcccaaattgagcatataggttcatctgcaatacctaatgcattctcaaaaggtgatttagacatttatattgaggttctacccgatcaatttgagtttgcaatagaacagttaaaaacgcttaattttatagaaaagcaaaatacattaagaacaaatgagctttgcatgctcgattcactcaacaacgatgatgttgcctttcaagttgtagtaaccggttcaatattcacatttttcttaacctttagagataagcttatagcttctccaacattagttaatgaatataatcaattaaagttagagtccacccacttagatcatgaccaatatagagcagtaaaatctaattttattgaacgcgttttaagtcactcctagtgtaagtattttttctttatgaataactaactaaaattggctcctctaagctcaattttttggtaccattcaccatttgattctgtctaaattttctttgtctatgacttcttcttatcatcaacaacttcaagctaaaattgatcgcattactactcaattttctgaatttacaccgcctacattagaagtgtttgaatcgcctgaacaacatttccgtatgcgtgctgaatttcgcatctggcatacagaaaatgatatgttttatgccatgtttgaacgtaatgacgatggcaagcaaaaaaccgttgtacgcatagatgagtttcctattgcagataaaagcattaatgacttaatgccacttcttttagcagaacttaaagccaactctttactttctcagcgtttatttgaagttgactttctcgcaactctaagcggagaaatgttagttaccttgatttatcaccgcaagcttaatcaggaatgggaacaagaagctaaagcacttgctgaaaaattaaatattaaaattatgggtcgtagccgaggccagaaaattgttattggtgatgactttgtggtagaagaatttgaacttttaaaccgttcatttaaatacaaacaaatcgaaagtagctttacgcagcctaatgcacaagtttgcaaaaaaatgctgcaatgggcatgtgatgcagctgaaggatcaaaaaaacacctgttagaactttattgtggtaatggtaatttcacacttccactctctttaaaatttgaaagagtgcttgcaactgaacttgcaaaatcatcagtttatgcggcgcagtggaatatcgaacagaaccaaattgataatattcaagtagctcgcctctcggctgaagagttcactcaagcctatcaaggtgaacgtgaattccgccgtctacaagaagcagatattgatattcaaagctacgacttcgatacagtattcgttgatcctccacgcgcaggaattgacgatgaaactttaaaactattgcagagctttgaacgtattatctacatttcatgcaaccccaacactttatatgaaaatttaaaaacgctcactcaaactcatcgcgttactaagtttgctttatttgatcagttcccttatacgcatcatgtagagtctggtgtcttacttgagaagatttaaacaaaatttttcaatgtaaccctattttataaggagattaaatatctccttatttttcaaggtgttttaattaagtatttaaatttaaaaaaaatatcaagtcatctattcgtcataatttcgtttaactcgaccattactatcgaaaattctctagttcaactggtggatttatcacatatagagtcttgtattttaatttatattggctatatttcgagctatgttaggttgtatatgaaggctctatgagtttttggcaaaagctgttcttggcagatcaacagcataacgagcataaaaaccaaactgcttgtgttgaaaatgactgctcatgtaaaactaatgaacaacttctaagtgcgcttgcgcaagcgactgatgaagatgtcattaagggaatcaagaaagttcttatttcccgtggttatagccgaaaagagttaaatgaactcactcaaaaaccatctattcattaattaaaaagccagtcttgtactggcttttttatattttacttgtgtctacaatctgcctgatccacccatccaataataggccccatattaaattttttgtcatttcgattattcttatgcaaatataaactagagatagaaccgtcaaggtatagagcttgctcgacttcaagatttttttggaagaactgagcaaaactatagaaattcactctatttttagatatcacaaaatacaatttattattttttacacctaccccattacgtattttctttgaatcgctatttgctaggaataagggatttattttgccattaatcactaacatagggccggactgcgtagcataatcgggttgaaaaacttttgctttgtattgttcagttgtcaatataacagcttgtttgtcattccatgctagaactccattaggctgcaaaaagaagtttccccagcctttatcttcatttaaaggttggctctctcgtccgttttcaatatatagtcctactggagaaaaaccggaatggaacatgcctccattcatcgcaaaagtaagctgttcacatgctttaagttgatattgaatattgtcgaaacttttataatattgatcagtttgcggatttttcagaaataagcgtaattgttctaaattagaaatttcaattacttcaaactgatcatcagtagtatttctaatctgccgatactctagtgctaaagcggattgtgtaaagattatgaagttcacgatacacagtactagtattttcattaatgccaaaccttagatgtcattttattttcataaagacactttattaaataaaaatgtttgaagtgatatatacccgaaagtcgcttattccacctaatcaatacactagaacacaactatattcgttataatagtcacagctttgtataaaagtgattaaactttattggatcagcgtgaatatgcaacaaacaaataaacgctaccctttaggggctcatcttattgtaaaacatctcggctatagccatcatggtatctatgctgggagaggtcgagttattcattattcaggcctcgcacatttcatcaaaaaacggcccattgaaatcacttccctagatgccttttctcatggcaaaaaaattcatgtacgttcttatgatgcaccacgctacagaggaaaagttgttgtacgacgtatgcgttcacgtatgcatgaaaaccattatcatttgattattaataattgtgagcatttatgcagttgggcgattactggtatcgaaagtagtactcaagttgagcgaatgatgcatcgtttaaccaccattggttacgtgagctcaatcatgagctatatgaatggcatgatgctaaccgtagcaaccacctgctttgctcttgttctttatattaaaaagaaattacgtgatcaggcaaaaatgaatattccgacttatcaatttctaagagaaaaagccgaaaaaagaaatatagacccaacctcacctttagtctttatagaaccagataaaaaagaaactatctaattaaaaaagtcctcaagttgaggacttttttagaaaacttacaacttattttttagctgcactagccgcagttgcttcagttgtaatgtttacagtgatcttatcacccacgtttggtacatagttacctaaaccaaagtcagagcgattgaacgaagttgtcgcgttaaaaccaatcgctggaacttttgccattgggtgctcgccttgcttatttaagacagcatcaagtacaactggcttagtgatacctttaacagtcaaatcaccagtaattttaaaatgttttttatctttagtttctactttcgtacttttgaaagtaatgtttgggtatttagccgcattaaaccaagcttcttcttggaactctttatctaaagcaggtacattggtattcacactgcttaaaggaatggtcacatttacagatgagtttgctggtttagcattgtcaactttaattacaccttggatgtccgagaagttagcacttggggttgaaaaaccgaagtgattccacgagaaaacagtagctgtatgtgttggatcaattttatagtccactggtgcagctaatgtaactgtacttgccaatgctactgctaaaccgaagcttaatgttttaagatgcatttttcgtatcctttattgatatagtcgttagtgtatacatcaagtaatttaattcactattctttataaaacgatatgtttcatccatgcaacaataaaagcgttacagttgttattcaaaaaccatattataaagtatagatattcttctattcgaagctttcagatttattaatttttactacgattttattgataaataacaaggtaaaacatggttaacactgcccaagcacaaagtacttctactccttatcgagtaacgcttaccgatccttcaggccatcaatggtttgcagatgaacccaccgataaaggtggacaagatacagctccaaatccggttcagcttttattatcggctttaggagcttgcactacaattacactagaaatgtatgcaaatcacaaaggcatcaaaattgagcatgtacaagttgatttagcattaaatccaaatggtgatccagaagcaggtcaaaataatattgagcgtaaaattactctaaaaggtgaatttactgaggatcagcataaaagattattaaaagttgctgaaaactgccctattcataagcttttaacgtctaatattacgatccaaactgaacttaacatttaaatagctcataaaaaaagcgccccaatcgggacgctttttattctgctcaaaagattaagcagttaactcttttaccgcagcaactacagcctcagttgtaataccgaagaattggaacaagtcttttgctggtgctgactcaccataagttgtcataccaattactttgccatcaagaccaacaaacttccaccagtagtcaacatgagcagcttctacagcaacacgtgcacgaatatgagctggtaatactgcttcacgatatgcagcatcttgtttcatgaactcttctgcacatggcatagaaacaacacgaacaccttcaagttgagcataagcttccattgctaaagaaacttctgaaccagtagcaataataattgctttcaactcacctttctcttgagcaagaacataaccaccttttgccgcattttggatttgctcttcagtacgcgtttggaatggtaagttttgacgagagaaaataagtgctgtagggccatctttacgctctaaagcagatttccacgcaattgctgtttctacagtatcagcaggacgccaagtatttaagtttggtgtgccacgtaaagaagcaatttgttcaattggttggtgtgttggaccatcttcacctaaaccgattgagtcatgtgtataaacatgaatcacgcgttgcttcattaatgcagacatacgtaccgcattacgtgcatattccataaacattaagaacgttgcaacgtaaggaatgaagccgccatgcaatgcaacaccgttagcgattgcagtcataccgaactcacgtacaccataatacacgtagttaccagccgggttttcttgaacgccttggcaacctttccaaagtgttaagttagaacctgccaagtccgcagaaccacctaataattcaggtaataaaggaccaaatgcttgtaatgtgttttggctcgctttacgagttgctacagtttcagctttagcatttgtttcacgaataaatgcatctgcttgagctgaaaattctgttggtaagtcaccgctaatacgacgaagtaactcagctgcttccgttggatattttgcttgatattgagcaaacacttcattccaagctgcttcagcttcattaccttttgctttagcatcccatgcagcatatacatcagcaggaataacaaatgcttcttcagtccaacctaaagcttcacgagttaaggtaatttcatctttacccagtggtgcaccgtgacagtcttctttaccttgcttgtttggagaacctaagccaataattgttttacaaataataatcgttggtttttgagtttctgctttagcttcaactgttgcttgacgaatcgcatcagcatcatgcccatctacacgaagaacttgccaaccataagacttgaaacgctcttcagtgtcatcactaaaccagccttctacttcaccatcaatcgaaatgccgttgtcatcataataagcaatcaatttaccaagctgtaaagtacctgctaaagaacatacttcatgagaaataccttccattaaacagccatcacctaagaaacaataggtaaagtgatcaactacttttaagtcatctttattgaactgagcagctaaagttttttctgctaatgcaaaaccaacagcgttcgcaataccttgacccaaaggacctgtcgttgtttcaattcctggagcataaccatattcagggtgaccaggagtttttgagtgcaattgacggaattgttttaaatcttcaattgaaagatcataacctgttaaatgaagcaaagcatattgcaacattgaaccatggccatttgataaaacaaaacggtcacggtttgcccattgtggattatttgggttgtgatttaaaaactcgcgccagacgacatcagcaatatctgccatccccattggagcacctggatgccctgagtttgcctgttgcacagcatccattgccaatacacgaattgcgtttgcaatacgacgttcgtttaaaggggtcgtcatagatcagaatccaattttaatagattgatgaaaagaagaagatgaataaccattcaatgccgctatattgtcttaaaaaaacgcctaggggtaaaccccaacactgtatatttctttatttttaactatttcttggttactcaaaaaacatttagattcttaagctgtgtaaaacaatagtatttatacttatttccatactcaacgattgtaagcttcttcctcttaatcaacatatagagttgtatttattttctttatttatagctttcacttcatagtctaaatcttcttgattaatatttaacaaaatcaaatgtttaaaatttaaacattttattaaaactctaatataaaaatgattaattttcatctatctatatcaatttccctgatacacatatcaattaaaacatagtagaaatgaaagaaattcatgctttttagtcagtatgaactggtcctcaagctcaagtcgatgtaacatattatgtctttttgaaataaccaagataggactttcatgcgcgagtacgctgtttttacctcggaatctgtaagcgaaggtcatcccgataaaatggccgaccaaattagcgacgctattttggatgcaatcttaaaagaagacccatacgcacgtgttgcttgtgaaacactggtaaaaacaggcgctgttgtacttgcaggtgaaatcacaacaactgcgaatattgatgtagaagctgttgttcgccaaactgttaacggtatcggctatcaccattcagatttaggctttgatggttcaacttgtgctgtaatcaacatgattggtaaacaatcaccagagattgcacaaggtgtagaccgccaaaaacctgaagaccaaggtgctggagaccaaggtttaatgtttggttatgcaagccgtgaaaccgacgtgcttatgccagcccctatttcttatgctcaccgtttaatggaacgccaagctgaacttcgtcgttctggtgcattaccatggttacgtccagatgcaaaaagtcaggtaacttttgcttatgaaaatggcaaacctgtacgtttagacgcagtagtactttctacacagcatgatcctgaaattactcaaactcagcttaaagaagctgtaattgaagaaattattaaaccgatcattcctgctgaaatgttccatgcagcaactaaattccacattaacccgactggtatgtttgttatcggtggacctgtgggtgactgtggtttaactggccgtaaaatcatcgttgatacttatggcggtatggctcgtcacggcggtggtgcattctctggtaaagatccatctaaagtagaccgctcagctgcgtatgctggtcgttatgtagctaaaaatattgttgctgctggtcttgcggacaaatgtgaaattcaggtgagttatgcaattggtgttgcagagccaacgtctatttcaatcaatacttttggtactgcaaaagtttctgatgagttaattatccagttagtacgtgaacatttcgatttacgtccgtttggtattactcgcatgcttaacttaattcaacctatgtataaacaaacagctgcttacggccactttggtcgtgaaggttcagatactgcatttacatgggaaaaaactgataaagttgaagcacttaaagatgccgcaggcctttaagctgattatattaaaagcccgctcttcagcgggcttttttattatttttgtatttgattaaaattaaacaatagccccttcaacatacattatttaaaggcatgaagtgagtattaagcaatattattgttttgtgctcttatcaccttcatttaatacatctaacagagtcgattgcacaggtgtatcttgatgattctggatataaagatgaacaactttgaatacgacaacaactgctagacaagccatcacacaaaacatccataggccatatggactacgaatatggtgtgaaccgcaatatggacatgatttatcagttgatgccacaactttgtcgcaacaagcacaatgatattggtatagcataggtaaccctccttccctcacttcaaccgttgttgttttaataggtttgctacatttttaaatttatacatcctttatatttatcctatgtgaaatgaaaagataattcaatctgaatgaacaatccgttcaaatttcaaatatttaatttatacaaagagatagactaaatattatttttttagcactatttttcttattttgatattttgttgaatttgttaaaatagaaacatattttattttccaggcgaatttatgacacagctcattaataaaggtggctttcgtgaaagagccaatagaagccaaaaatatcaacaatctgaaaacaagcaagtagctctgccttcaaacaagtatcaacctcaaactaagctccaagataatcaaaacgagatgattcaagcaaaagcagttatttctgaaacttcagatgattaattgttataaattaaaaagggcctaaatcttttagatttaggccctttttgtataatagattaattaatctttatttttatgctcaattttcttgtggtctggagtaacttctctcgcttcgccatcaataatactagaatcatgatattggctaccaccaccttgttgattctgcatatcctgcatttgacgcattaaatctgcaaatgggttttgaccagcacctgcaccacccatgccgcccatcattttattcatcatggcttgctgacgttttgcgagtgttctcattgcaatattacgaaacgcagtttgtacgcccggaataagaattaagagcgctaatacatccgataccaaacctggcaacattaataaaaaaccagcaaaagcataagctaattttttagtcacagtcggatcattacccaattgtccagtcatctgcatttgttgtaattgcggcataataccagccgtactattacgaataagcgttagaccaataaagaaagcaataatgaaccagaaaaacacataccatccactgatgaactgtgctacaccaatccatacggcaatttcaacaatcgcgcccagaaccacaataagaagtaaattcatgtaaaactttatctatctcaaaaagaaaattcattgcagttgttactacttaactaaactcatccatttttcatttgaaatcatggattaaatttagttgcaaagcttagacaatgtttttgttgtaacctaaaatcatagctaaactaaggttctgcaatactataaataagactgattctaacttaataaaacagtcatactctatcattaatgagtgctataacaactttatcaagtgttttttctacaagattgcaattttttcatgaattggccgatacttttatctattagcagcttttttataaaatttaacttacatttttgatatctaataattgatctactcaagttacattaattagctaaacttcaaattcaatcttataagtcttatgaacattaaagcactcttacttataacaagcgctatttttatttcagcctgctcaccttatatagtgactgctaatccaaatcacagcgcttcaaaatctgatgtaaaagcagagaaaattaaaaatttatttaacgaagcacacactacgggtgttttagttatccaacaaggccaaactcaacaaagctatggtaatgatcttgctcgtgcttcgaccgagtatgtacctgcttcgaccttcaaaatgcttaatgctttgatcggccttgagcaccataaggcaaccaccacagaagtatttaagtgggatggtaaaaaaaggttattcccagaatgggaaaaggacatgaccctaggcgatgccatgaaagcttccgctattccagtttatcaagatttagctcgtcgtattggacttgagctcatgtctaaggaagtgaagcgtgttggttatggcaatgcagatatcggtacccaagtcgataatttttggctggtgggtcctttaaaaattactcctcagcaagaggcacagtttgcttacaagctagctaataaaacgcttccatttagccaaaaagtccaagatgaagtgcaatccatgctattcatagaagaaaagaatggaaacaaaatatacgcaaaaagtggttggggatgggatgtaaacccacaagtaggctggttaactggatgggttgttcagcctcaagggaatattgtagcgttctcccttaacttagaaatgaaaaaaggaatacctagctctgttcgaaaagagattacttataaaagcttagaacaattaggtattttatagagttagtttatagcccagttcacttttaccattttgatctgggccattgctattttaaaactgataatctatccatccactggttcaaatggagtattcaaaattagttggtaaaaagcagcgtcaagccattgcccaaatttaaagcccacttgtttaaaagtaccagcgtgggtaaagcccattttctcatgaaggcctatactggcttgatttgtcgcatcaatacaaccaatgagcacatgaagttgagcctgttgagcacgttgaattaacgcttgcattaaaactttacttagaccacagccacgatgttcatgatgaatatagatactatgctcaaccgtatatttataagctggaaacgctctaaatgttccccaactagcaaatcctaataacttacctaactcatctactaccccaatgacagggaaaccattttctctttttaccgaaaaccatgttttcattgaatcaagtgaacggggaacatagtcatacaatgcggtagagttaacaatcgcatcatttagaatttctaatattgctaccgcatgctctgcttcattacaatcaattaaacggaaattagaatcgagggaatagttcataaagattccttaagagcgggcaccagttgattagaaacgactaaaatataacgagcaacttgagctgaatgattactgtatatgacaggttgatctaattgcattgccaagcaatccccttgacctaatgcataagaagtttcacctaattgaatttcaattttcccttcaacgacccaaagctgctgctgtaccactctagagctttcattagtttcataagtaattcgagaatgaggcggaaattcaatttcaacaatctggaagggtaattttaagttcggaggtgaaactgtacggcgtatatagccagtttccggatctcgccactcagcttgttcattccgacgaataagcggttgagatgatgaattccctgcttcattcgtaaaaatttgagttaaaggtacttcaagaccatttgctagtttttcaagaacaactgccgtaggactcgtttctcctctttcaattaaagaaatagctgaacggctaacttggcaacgggcagctaatacatctaaagtatatccacgtgctaaacgcagctctcgtattcgatgtgcaatccttatattgatatcatccattaaagaagctcaattccatcattatagataagtattccattaaaatagaattacatcaaatgatttcaaactcttcattatgaatatatggaaaattgggtggacaatataaatctttaggattaaaaaccgaaaaataaccattcatagcagcattctttaaattactcatgcagaaccgatttggctatgtaacaataccctctaaactatttaagtaagtcttcacatgccattgattattggaattgatccaggttcacgcttaacaggttacggaatcattgaaaaagatggtagtaaactacgttttgttgatgccggtacaatccgaacggaaactcaagagatgccagagcgcttgaagcgtatttttgctggtgttgaacgaattgtgaaatttcatggtcctactgaagctgcggtcgagcaagtctttatggcacagaaccccgactctgccttaaaacttggtcaagcccgtggagctgctatagccgctttagtgaatttagatttacaagttgcagaatatactgcacgccagattaaacagtctgtagtgggatatggtgctgccgataaagaacaagtacaaatgatggtgatgcgtttacttaacctgaccattaaacctcaagccgatgcagccgatgctcttgctgctgcaatttgtcatgcccacgcttcaggaagtatgagcaaactaaccgtcttgaatgccttaggtggtatggctcgtggacgaagtcgctctagtagccgtagacgctaaagttttattgtttattgatttactacttgagtaattgcttgattcatctcataagcttgtaaaccgcgcatgccttgtttggcaagttggtcacctgcctgagcatggagagttacgatctcatgtagggtaactgctttgtggaactgggcttttaagcttgcaatcatgcccgccaacacatctcccattccaccagttcccatacctgcattaccttgcgtacaaatatacaagttatcttctaaaattaagctgcctgctcctttaagcacccactggcctgcatatttttgctgcaacgcataaatcgcagcaattctgtcattttcaatttgccaagtagaacaactaagtaatgtagcggcctcccccggatgaggtgttgcataaatatgtaaactcaatttttcaggctgctttgcgagaaaccatagggcatctgcatctaatacaacttctaaatgtgaagtctgatttaaataattaaaccactgttgatagatttggagtgcccactcatcacggcctaatcccattccgaaacatactgcatcaacctgagataaaatttctttaataccgttttcatcgaaatcattaatatcacgcagcataatattaggagctcgcgacaaaatagcctgatgatggttgcgatgacaaactaccgtaaccttgcctgcccctgcatgaaaagcagcttcagcagccataatgacggccccgcccatttgctcatgtccacctatcaccaaaacatgcccataacttcctttatgtccaaaagccaaacgtttaggaaagttgatatgtgttggcgtcaagtaagcaagaggtttcagctcttggtctattggtattaaattaattaaatgaatttgtcctgcatattctttaccttggcctgtaaacagtcctgctttaagccctaaaacagtaaatgtatgatcagcccgtattgcacaaggtaaagtagagccagtatttgcatgtaaaccacttggtatatcaatcgaaatttttagccctgcttgcccattaaattgttgaatagcatgttgccaataaccgtttaattcacggtttaaaccaatcccaaacaatgcatcaatatgacaatcaaatgtcccgttgatctcaaaaccttggtgtatttgaacatgattttctttcgcaaaatggacagcgtggtgtaaatcagctgactcgcccaactcagccgcaaatattccaacctgaaacccagcttgtttgagatagcttgctataaaatagccatcaccagcgttattaccctgtccgcaccaaacagcaatattcttaaaattttgtttttgaaaaagtacaatgagttgttgagtgattgaccaagctgcttgttgcattaggcctaatgaggagttttgcgcagcaaaccaacgttgctcccatgcctggatatcttggctatggtaaactaccgcctgcatattcttatcctcttgcatttttcggtttatgacatcttccaacacatcacgcattgcagtgcaacaaattgatccacatgaattaaaagcatggatcaaagctcaagcattagacttgggttttgctgattgtgtcattgccaaaccagatgctcaagagcaaatgccacgttttttagaataccttgaacgtggttatcatgcagatatgacctatttagaagaaaatctggaaaagcgagcagatccaactttattggtgcctggaacaaaaagtattatttgcgtacgtatgaattatttggtggaatcaccaaaaccacgatatgtacccttcgaaccaaactctgcgattattgcccgttatgctcgtggtcgtgattaccataaggtgatgcgtggcagattaaaaacgttagccacacgtatccgtgaaaaagtgggagattttgaatcccgcccttttgcagactcggcacctatttttgagaaatcattagctgaaagtgctggaatgggctggacaggtaagcatactttactcattcataaaaagtcgggttcattctttgtcttaggtgaactatttacatcactcgacttaccttttgatgaacctgctacttctcactgcggttcttgtagtgcgtgtattgatatttgcccgacacaagcgattgtcgaaccttatatgttagatgctagacgctgtattgcttatctcaccatcgaatataaaggaatcattgcagaagaattacgtgcaggcattggtaaccggatatttggttgtgatgactgccaattaatttgcccgtggaatagttttgctaaaacagcatctattcccgatttcaatcctagacatggtttagataatattagtttgcttgatatttggcagtgggacgaagctacttttttagccaatacagaaggcagcccaatacgacgtacaggttatcaatccttcaaacgtaatatcgctatcggtttaggcaacgcaccgtactcaaaagaaattgtagatcagctaaacaaaggcaaaagtttacatgacgaaatcgtcaatgtgcatattgattgggcaattgaacagcaacttaatcaactttagctatcaaattaaaaaaatgatgttttttgccctatagctttaatacgaattctgtatgattatgtacagtgaattaatgccatcatcatggatatgacaatgactctacgtaatgattggactcgtgaagaaatccaagctctatatgaacaaccttttttggatttagtttttaaggctcaacaagtacaccgtgagcacttcactgccaatacaattcaggtcagcacccttttatctattaaaacgggtaaatgtcctgaagattgcaaatattgctctcaatctgcacattacgattcaaaattagaagcagaaaaacgtattgctgttgaaaaagtaattagcgaagcaaaagctgcaaaagattcaggttcatctcgtttttgtatgggtgctgcttggcgtaaccctcatgagcgtgatatgccttatgttttagaaatggtacgtgaagttaaagcattaggtatggaaacctgtatgactttaggtatgcttaatcaatcacaagcagaacgcctaaaagatgctggtttagactattacaaccataaccttgatacttctcgcgagtattattcccacatcatcagcacacgtacttttgatgaccgtttgaatactttagattatgtacgtcaagctggtatgaaagtatgtagtggcggtattgttggtttaggtgaaagccgtgaagatcgcattggtttgttacatgaattagcaaccttgcctattcatccagaatctgtgccaatcaacatgcttgttccaattgaaggtacaccattagctgatgttgaaaaactagatgttattgaatggattcgtactattgcggtagcacgtattattatgccgcatagttatattcgtttatctgctggtcgtgaatctttaagtgactcagatcaagctttagcatttatggcgggtgcaaattctctgttctctggtgataaattacttacgacgccaaatgcaggtgaaggtaaagaccaagcattatttaataaactagggttaacagctgaaaagccaaaaccaactgtttctgatttatcagttgatgcgatgagtgcttaacctcagcaaaaactgaaaagccctgatcattcagggcttttttcatttatacagaagtgactaatatgccataagtagcattcagaaaggttccaactcgaataatatccctacctgccgcatgggtaaccgataactcttggctcaatacatcaaagtgaaaagattcaaaaacatcttgatggtgtaagagccaagtcactgtatctgctatattatcatctgcaatataagttaaggctttaaagtctttactcataaataactcttaaaaataaattttatgaattctatatgagttcattctaccttaaaagaaaatctaagcagccttcggattcactaatgaacgccccgacaataagcttgttaacgctttaggtgaaaactctaaagaaagtacatgattctttaaattgattgagtggctactaatcaatggtaaaagcccctcttctgtttctaaaacatactcatccgcaatgtttagaataccttctagatttgttgtgctagaggctagatcgtggctaaagacatcataaattgtttgtaaattaaacgtcgtgttctgttcagtaggatgtttgagtaaatagtcttttaaaaacaagactaatttatgagcaaagaaaaaataattcggtttatacgtgtatttcatgttgttcatggaaccaaactccagatgatcttttattgaattacaactaaaacactaggaattaaaccttaaaattttcttaaaaaaataaatatatttacacgatatataaaaattaattttaataatgaaaatcaactagttaatttatccaaaaatatataatttatataaaattacaataaaaaaatcaattcttaaaaattaaaaaacttaaatgaaaattattatcaaattaatttaaataaaataatttcatgatattttaccatatggtataaattaaaataaaaaccgcatttatcaataaaaaataaccaatcaaaatacataaaaatataatgttattcttgttttttacttgaaaggtgctatatttccaccgcattacttgatcagaataaaagcactgaagagtaataaagcgatatttattgaatattttggggattttatgaaaaaatttatttttattgcggctagctctctttttaatattgcagcagcacaagcagctgatggtacgatcactattaatggtttagtaactgataatacgtgtacgattgatactggtgataaaaatctcactgtaaatttaccaacagtatcatctcaatctttgaaaaatgcgggcgatgttgctggtcgtacaccttttcaaatcaatttaacgaattgtgcttcagttggtaaagtcgcgacttattttgaaccaggcgcaacagttgattttaatactggtcgactattgaaccaagctacctctggtgcagctgccaatgtcaacatccaattattgggtagcaacaatgcagtaattcctgtaattgcgaaaggtgcttctggtgcacaagataactcacaatgggtaaatgtttctgctggagggaatgccgatcttaattattatgctgaatattatgcaactggagcatctacagcaggtactgtaacgtcacaagtgaaatacacgattatttatcaataaattaaaaccagcttctatttttaaatagaagctatatctcatctattatttattattgagaatatgactcatgctttttcgtggtcgtaaatttttttggggaatggcttgtcttcaagcattaattgctactacagggcatgccgaaatagtacttcatggtacacgtgtaatctatccatcagatgctcgagaagtaaacttacaactcagcaataacggtacagcgccttccttggttcaagcttggattgatgatggaaacgctaaatcaactcccgatgaagcgaatgtcccttttatcattacaccacctatttcaagagtagaaccctctaaagggcaaactttacgaattactgcactacctaatgcttctcaattaaaccaaaataaagaaagtgtattttggcttaatgtattagatataccaccaaggccggaaggtaaaaaacaagaaaataatgaagtattaaccaataattttcttcaattagcgatacgttcacgaattaagttcttttatcgaccagtaagtctaaaagaaaatattaatacattaagtgaaaaaattcagtgggtaaaaaatggtgaaaacttgcttattaaaaaccctactcccttttacattacaataagctcaatttttcaagaaataaatcatcaaaaaacagatttattaaaacagggtttaatgctttctcctttttcagaagatcaaataaaacttaaaaatagcaatataacaaatatgagctttgtttatataaatgattatggtggaagaattgaacaagtaataaggttctaagcttacctactttttaatttaaacacctactcatgaacaggcataaagacgatgtcagaatggttcatatccagtatatgctttaaaaagcgcactacatattatttagtattgagtctcgcaattaatattcccttaactgtatatgcatcagacaatatgaatagggaaaatattttaaaagctgactttgatactaattttttagtgggaaatgcacagaaaattgatattggtcgatttaagtacggcaatcctattttaccgggtgaatatagtcttgacgtctatattaatgggcagtggttaggaaaacgaaagtttgtttttaaaagtactcgttcgaatgagaatgcaaagacctgttttaccccagatatgcttttagaatatggagttaaaccagaaattcttcatcatgaagtaagtagtacctttacctgtaatgacttggacaagtgggttaacgatgctttttatcaatttgatacttctcgtctgagacttgatatttcaataccacaagttgctttacaaaagaatgctcaagggtatgtcgacccacgtttatgggaccgcggtataaatgcagctttttttgcatacaatgcttctgcctatcgtattgtaaataataaccatgaaacaaatcatgcgtttatgggtacaaatgttggtctaaatctctatgattggcaattacgccatactgggcagtggaaatggcaagatcataatgaaatacaagaaaaggtttcttcctacacatcaaataatacatatgcccaaaaggcttttcccaagctcaatagtgttgttactttaggtgattattttaccaataataatttttttgatgccctaccttatcgtgggattaacatatcaagtgatgaccgcatgcttcctaacagtatgctcggatatgctccccaaattcgaggttatgccaaaaccaatgcaaaagtagaggtacgtcagcaaggaaatttaatttatcaaacgactgttacacccggaagttttgaaattaatgatctttatcccacaggcttcggtggcgaattacaagtctctatatatgaaacaaatggagaaattcaaaagttttctattccttatgcttctgtcgttgagatgctacgacctaaaatgagccgatattcttttactttgggacagtttagagatgccaatatcaatctaaaaccatggctagtgcaaggtaaatatcaaagaggtatcaataactatttaacaagctatacaggctttcaggcaactgaaaactaccagtcttttttaataggtagcgcatttgcaaccccaatcggtgcaatttcatttgatgcaactcagtcatcagctgagttcgaacaaaagcccacccttaaaggacgaagttatcgtttaagttttaaccgactatttactccaaccaacaccaatttaactttagctacgtatagatattccacagaaaattatttgaaattacgcgattcaattttaattcgagacttgcaacaacaagatattgatagcttttccgtggggaaacaaaaaagtgaatttcagatcacattaaaccaaggccttccaaatcaatggggtaatttttatttagtaggctcgtggattaattattggaaccagcctaatcgtaatcaacaattccaatttggatatagtaatcaatttaaagatctgacttacagtatttctgcaattactcatgagtttgaccaagaaaatcaaaattctggtcacgaaacgcaatatttgttgtctttatcttttccacttcaatttaaaaaaaataccgttaattttaatagttctatttcagaagatagccgaactttaggaatgagtggttatatcggaaaccgctttgattatggctcatcaatttcatatcaagatcaagggcaaacaagcctaaatattaatggcacctaccgtactaactatacaactataggcgcttcttttggtcagtccgatacataccaacaagaaatgatcaatttaaatggaagcttggtcgctcactcacaaggtattttatttggcccagaccaagtacagaccatggtattggtatatgcgcctcaagcgactggtgctcgagtcggcaatatctctggtctaagcattaataaacaaggttatgctgtcattccttatgtaaccccctatcgcttaaatgacattagccttgaccctcaagggatgccatcaactgttgaacttacggaaacaagtcatcgtattgccccatatgcaggatcgatcactaaagttaacttttcaacaaaaacgggatatgcagtttttattagcacccaaacacctaatggcggccatttgccatttgcagcacaagtttttaatcaaaacaatgaaatagtcggaatggtagcccaaggtagccggatttatttacgtactcccctaactcaagatcatctttatgtgaaatggggacaaagtaatagtgaagaatgtcaacttgattatgacattcaatcaaaaatcttacaggaaaaacaattaattattatgacagaggcagtctgcaaatgaaaaaaatgcttataaagagcggtttactcattactagtttttttatttataaccaaacctatgccaactgtactttaagcaagggctttaccacagtcgatattccaatgacgattgggactattgtagtacgcccgaccgatccaatcggaacagttctccaaaagaatacttttactatttcacccaataattctactgcaacttgcaaccgtgccagtgaccaaattacagcggcacttccattaaactatcctgttagctcgattggaaataatgtgtatgcaaccaatattccgggtataggtattcgactttatagagaggcattcgactctacagatttttctggatattacccttataaacgcagcttgactcctaatacaacatatacgctttcaccaggatattttgttatggaagtgattaaaactgctgcaactacaggttcaggtgcattagttgctggtcgttacagtacctattatgtaacaggacaacaaaatcgccctttcttaacaactacagtattgagcagctcccctattcttattgcatcatcttcttgtgaaattcaaaacggcatagatacggttgttcagcttcccactgtgatgaagtcaggttttagagccattggatcaactcaaggtgagaaaaactttaatttatcgattctttgtaatggtggggaaaataactcaggtgtaccaacgagtaatacactgagtttaagttttgactacatttctgacacttcaaatagtcaggttattaataacagtgctgctgactcaactaaagcgaacggagttggtgttgaattgttatggaatatgaatggcgcgaacaatcctattcgaaaaggaaacaaactagatattggtacagtaagttctaaccagacagtacagtacgatattcctttaacggcgcgttattatcaaactgcttcgaatgtaacagccggtgaagtcaaagctaatgcaacagtaacgatccaatatgattagcatttcttataaacgctagagcttagtagtaagtagtaggctttatagaatgaataatttttaattaatactaaaaaagtcaaatgatcacacacattattttttaaattttactaataaataaattaaaaaaatgctcataagcgaaaaaagctaatgagcattagtgataaccacttaacctgaaatacaaattgtgggaaatagatcacaatttgcatgactataatttcaaaatttagcttaaatatcaagtcttttttttaacaaaagtttgataaatttatttaacccattaattttaaataaaaataagttaaaaataaagtttacgattttcattttacaggctttctaaagaattatcattctattaattcaaaaaacataaattttatatatacgaatgtatagtaaaattaaaaagtgctcaaataggagggtttagttaaaagtaaatattatgtaattcgataaattataaagctttacataacctataagaaaaaaaacaaacacatatctggaaatatttttcaattacagcctaacttcaagtttttattacaaaaccacatgctcattatttggaaaatattttgtattttattattaagtttaggggctttcggaattggtttaggtattagttatttagattttttcttattttttattggtttactttttctgctgtgtttttttctagccttaaagcaagcaagagaagatgcaggaagttttcctgatgaataaaaattaattaagctaattgaagtcaaggcttaagcaatattaaacacgaaaaggttcaaaacaatctaaaagaaaatccatcactacccttactgcaggactactccgcagatcttcatgaattactaaccaaatttcagcactcattgggtcatcatcaggtaattttactaaatgaccttgctggcctaaaaaatcaggtagtacagctaaaccaactgctccacaagtagcccgccattgaagctcaggatgattcgtaaccataactggctctttataatttaaccgttgttttagcttttgctgtttttgtccttgaactccaccaacttcaacgctaatccacccatagttttcttcttgtatagcatccaaatattcttgggctgcatatatgccaaaaggaacttcaccagctttacgcgcaattagataatcatctttagggcgtccaaagcgaactgcgatatctgcttcgcgatgctgtaaggaggcataatgaacatcaccgagtattctcaattgtagctcaggatattgacgataaaacttaccaagatgaggcattaccaaatgtgcagccgtagctggcggtagacttaccgaaactactccactaatttcctgttgtcctgcctgagccagacgttcaatagaaaatgtttcttccatcatacgtgtcacgattttggccagacgttccccctctgaagttaaaatataagtacgaggtctacggtccactaattttagttttaaattatcttctaactgggcaattcttcttgcaacagtagcatggtcaacacctaactttcttgcagcagctgaaagtgtcttctcttcagaaaaaactgaaaagtaatgtaaattttcccaatcaatcattgtgcaaattttcacatcagagatgaattaatatggaattgtacacctttatgtgattactcagaataaagacattctttttcggagcccaatcatgaataaatcaatggtgtatgcctatactggtgttgtaatcacaatgctgttttggggctcggcatttaatgcgatgtcttatgtgattcaatatatgccacctctttcagcagcagctgaacgttttacaattgcaagccttggcctatttattctttttacagctataggaaagctacattgggtcgcattacggcaaaatttagctatctatcttattattggaattataggtattgccggttttaacctaggctgtttctatggtttacaaaccacctcagcagtcaatggcgctttaatcatggccacaacacctttaattactttgctgttaacaattttacttgatggagaaaaactgacgcttaataagtctattggtgttgtatttggcttaagtggtgtactttttgttattagtcatggccatatttcaacgctactacacttaaaaatagcaatcggtgacttattcatcttactaggtggtgtcagtttttgtttagcgaatgtgctatcacgccgttatgtaaaaaatgctacacctttagagaccacaaccttttccatgatgttcggtgctttgactttaatcatattaagtgtaatttttgagcatccttctcaagcaattgctatggcgcctatcactgcacacttagctatgggatacgtcattatttgttctaccatgattgcttatttattttggtttaatggtattcaaaaactaggtgcaggccgagcatcaatcttttttaactttgttccggtttttagtatgttagttgccttgttagctggtcaatcacttaatatctggcaacttataggcacagctttagtcatgcttggcgtgatgagtagtggaggatttattcagattaaacgtcctgcacttatagctaagccttgcacaaagtaatgatcacacaaattcatcttaattattgcgttgtaacaaagaatgtatgtttctttaaaacttaacaaatagttgccatatatagttttaaaacacaacaaggagaattaagatgaatttggattttacaactatcgaaaaacaggccaaattgctaaaagaagagcaagagaaactagaacagcaagatcatgattttcagttagctttagacaagcatagagaatcattaaaaaatttatttaaagaactttttcatgatcgagaaattaaaacagaaaatggaggacagttttgtgtagtatttggtgattttaaaatatctctactcattgaaacagccaaattcgagaatggtgttcctgttaaattaaattccgttaatcctattattgttaaatttaaaaaggataagcccgttgcaaaagcccaattttctgatgcaacccaatatcttgatagtggttttgaaacaccccactatcagtactattacaaacacgctgataaaacacaattagttcaattttcggagttacctgtattttttcaagcaatccttgatgcagaagtctgattatctgccctcaatggagggcttttttataaactgaatttacggatcaaacagactcatctttataaaaatagtcataacatcagtttcgttttctcaactcattttaatttaaaaacaaaaaattttaaggtatcagctcaaaaaaccatttgcttctttctcaaataacttgtatatacatgtttgtatttgtttatacataaatggatctaataatagaaaagctcttaaaggataaggagagtgttatggactcatcagctgggaaaccgaaaagcggatttgttgaaaaccgaagtattgactttattcctgaaaatgaaaggcatggcagtatatttgcccaatttacgctttggttcggggccaatttacagattacagctattgttacaggtgcattagccgtcgtattaggtggtgatgtattttggtcaatcattggcctctttattggacaatgctttggtgctgccgtcatggctttacacgcagctcaaggtccaaaactcggcctcccacaaatgatttcgagtcgagtccaatttggggtatatggtgcctgtatccccatcattcttgtttgtcttatgtatattggctttacggccactggtgaggtactcgctggtaaagcaattgctcatctagcacaggtgagtaatacaacaggtattttaatctatgcttgttttattattatatttgcgacaattggctatcgtttaattcattgggtaggcaaagttgcaagtgttattggtttaattgcttttgttattattttaactcaaattttagctctctctaatatttcagaattgcttgctgtacggcattttagctggtcatcatttttattagcagtttctctttctgcttcttggcaaatttcatttggaccttatgtagcagattattctcgttatcttcctacaaaaacatcttcaacacgcgtattttgggcagttgggcttgggtctttaataggctcccaaatttcaatgatgctcggtgtatttattgctcaagtctcgaatggtggttttgttggcaatgaagttcagtacgttgtaggcatgaatccaatcgctcttgtgattacttttttatattttagtattgcattcggaaaggtcactttatctacacttaatgcttatggcagttttatgtgtattgcgaccatttggaacagttttaagccaagtgctcaaatttcaaaattaacgcgacttacaattgttcttgcaatggtaattatctcaacatttattgcagttgtaggtgaacatacttttttaagcgcattcaaatcttttattttgtttcttcttacatttttcattccttggagtgcaattaatttagttgattactattttatttctaaagaagaatgcgatgtaaatgccttatatgacccaaatggtaaatatggccgctggaacacgattggaatcgcttgttattgtattggtatcttacttcagttgccctttattgatagtaaattctataaaggacaaattgccgaaatgttgggtggagtcgatttatcctggttagtgggattgttatccactgcagttttatattatgtacttgccaaaagagctcaaataaaaatttcaaaagctcttcaacttgaacgagtaaaataatgttaagacgagatatcaaagtctaaaataatactttgatatctcattaatatttttctactgttgagcagtacttggttgtgcagaggcaggcaatccaaataacttatcgaatgtccaattaaatatgaacgtataaattggaatgataataataaatgcaacatctaaccaaaatgcggcaacaagagaaatattcatccaccacgcaataagcggaattaagaacattactaaagtaatttgaaatccgatcgcatgcgcaattcttcgtttaaccgtacgcgacttactttcttggcgagcctcccatttttcataaagaatgttgtagataaagttccacgttaccgcaatagtagtaatcatcactgaaagtggcccagtgtgctctacactatctccggccaaaagagccaaacctactgatgaaatcaccattccaataatttcatatgaagaaacataaacaatacgacgttttaaaccttgcataatctttcaacttttattacttcttattattttagtttcagctaaaatcatatataaagttaacagctttcagttctactgatatcaaaatgaattttaatagtgaaaatatcgaacttttcttaaccgtattagatactggatctttctcggccgcggcacgtaagttaaatcgagtgccatcagcagtgagtatggcaattgccaatattgaagcagaacttggttaccacttatttgaacgtacacaccgcaaagttattcctaccgcggcggctttagcattggaacctcaagcccgtattattgctgaacagcttaggctattagctacgcatgcttatgaactatcacttggtcttgaaagtaaattaaaaataggtgtggtttcagatgcgaatactgaattactttttaaagccataaagcaactagcagagaagtttccccttcttaacctagaaattattacagctcctcaagatgatattctaaatttactttatacagaaaatattagcctttgccttgcaggttcaaatctcaatataaaaatgcgtgaaagcctacaattagtaatgacagaaacagttattgctacgatctctgctcatcatccgtttttaaaagaacagaataagttaaacacgattgaagagttaattaatattcggcaaattgtggtcgcaagtagtgagctggatatggaagactcacgttcaatcattggagcaatgtactggaaaacgaatagcttacaaacagcaattaatatggtcgaagctggcttaggatggggaaattttcccttatctttggtaaaagaaaagattgaacaaggccacttagttcaattagattttaaaaatacgaaaaatcatttgcctttatctatttatctcatttggcttcaagataaaccgttatcgaaagcagccagagagcttgtccagattgttcaagcaaacttatctcaaacttgtcattaaaaaaccgccatttagacggttctttaggagctatttagatttattagactctataactttttcatcataatgcttataacaatagccaaacatcgcacctgcactgaagaaaaacattgctttaaacatgatgacactcctatgccttattgattgaaagttaaacttagcatttagccatgtttcactttgagtactatttaaatcagttttgttcataatgaaaaattacgtgacaatctttttcaatttattaaaaacacttattttgttgattttattatattaattttcataaaaaaacgagaactctatgattaaattaaagaaagcaaaaagcctattcataatgaataggcttcttactgtatttcaggactaagcaataataataattatcaaaaatactctactactgtataaattccaagtgttttagtcaagtataaaattgatcaattacaaaaggttgtagaaaatgcgaaacaatcttcattctaggttttatccataaaacttactttaaatttatactatttttggacccgtacggcttctatttctagctttgaaaggacaaaattttataggttaatattgatagatttaataagttcatctcgatagggaccaagaataatttgctcaaccttattcattctattacgcatatcctgagcatgagcaatattcttaacgtccagcttttcttcatactgatctgttcttttgctaactaatgatttattagttaaattatttaacaaaaaataaaatgttctacgtagatcttgaaaagtaaaagaaagattacattgttcattaattttttttctaaattttgaaatattaataatatgaccagattcagattttacagatggaaaaacccactctcctttattttgtattcttcgttttttcatcagataccaaagaaagtttcccatataaattttatagtacacattattgtatggatttataaaagacagagttccttcctctaaatctatatttttccaatgtaaagattcacactcattcctaaaaagccctgttaatataagtgttaataaaaaatccttatttgtttcattttcctgtcccctacctttatattcaataattgcttgcacccacttggttaaattatccacatcgatatagtttcttcgaggtgggatttcttcccagagctgtttcttctttaacaaattaaccggatttatccttggtataattacttcacaatttttattttgataatacttaattgaaaaatgatagaccgctctaagtacacgcatagataaattagcttttgcataactatactgagataactgaatatacttttcttcaatcatctgttcagtaatatcaatcagtttaagttcacttaagtctattaaatatttttctataacttctttatagtcggctaatgtcctttcttttaactcgtggtgatttatatatacttggaaagcttctttgagataaggctggtcaattttctcatttaaactattttttaatattttattatttttaatgcttaaagagtttgagtcagttaactcttttaacttctgctgtgcaagtatacgggcgtcttcaagagtaattttttcgtaatcccctaatttacaacgaattgatttcccttttactttcttttccacaatgtaagttttataagagttatttacacgaatagcaaagccaataatctcactgtcacgataaatagccggtgtgagttcaagttgatcgataaatgacttagttagctttactcgtgaagtgctcataagctagaatccctatcgcttgtgataattaacaatatagcaaaatatttttcaggtctactgctgctacttttgaaaaatacttgtgtttaataaaaaaattgattagtattgcaggcactgaaaagccttgagattaaaagcttttctcattatagggcctatagctcagtcggttagagcagcggactcataatccgttggtccacagttcgagtctgtgtgggcccaccaaatacaaaccccaaaaactttaagtttttggggttttttaactttagatatttttaaaatatagccaaatatcacttcattattcaaaaattgttcaattaaacattaaaagccttttccaatttccgtattattgaacattccttttcaacctttaggactgttataaatgtttgaattgattatttgacctgttcttaagctaaattttgtttcaggattgattttgagctttctatttgaacatcccaaaacttttcccataaatcacaatattcgaggcataggttttctaaataagtgtagtcttcttctgtacaagcttgcattaaaataaaccatagatcttcttcatgatcgtcatctgctgcctcagcagtttcatcttcagatactccatgcacatggtaatagccaccaccctccaccgctatacctacagcactggttgcttttcgtaaaggtggactgtacaaaataacttcttcttcagctacagctaataaagcagaaacggctttatagtctttataggaattttctagaaactctctcagctgatgtgcaatttctgttggttgataactccggcgctcttcctccgtcactccaaaatcatcaaggacatcttcaaataaaggataatgtgcatattctgggttaccttgataataaccgtctttgtcggtcccaggtcgaaacccaaactcatcaaatatattaagactcaaaagacagcgcggaaacatctttgcacctgcatgcaacctaggttctaactgctttgtctggtattgagccattaataaagcgtctgtaaatgtttgtacgattgcatggcgatactctaaatgaatacgctttaagttttctttattaatttcaccgttatttaaagtttctattgcaggatgatgagatactggatgtttcgcaatcttggctcttaattgagttaaaaaattaagatttttgtcccaaagttcagctgaaatgctttgtttcatccctgcaagtgcttttttcctaggattattaaagtcctcaaattttttaggcataatccactctcattaaacttattaattttttaaatttccgtattctgtttttaaaacaaatagttaagataaaaataagactcttttgttgaaaattcatattagaattaaaattctactaaatcaaatagaatatttaaaaaatttaaaaataatcttgagtagcttttataatattcgcttgaataaaattatgtttttgattatgattaatttgattaaaattttaaaatctatatcaagtaataattagtttcaattatatggaaatgtaatgtcaaaaaaagaagatattataaatactgctttagaactttttaaccaaattggttacaatgctacaggggtagacaaaattattgctgactcaaatgtagccaagatgactttctacaaatattttccatcgaaagaaagtttaatcatggagtgcctacatcatcgaaatattaatatacaaaattcaatttatgaaaaattaagcttacatccagatgtgagtccaattgataaaatacatctaatttttaattggtatattgactgggttaatagtgagaattttaatggttgcctattcaaaaaggcttttattgaagtgtctaaacaatacacctcaattcgtgaaccatttcaagaatatacaaactggcttataaatttattaaatagtttattagtagagctagatattaaagaccctactccacttactcatatcatcatttcaattattgatggtattattattgatgggacaattgataaagatctgattgatccctctaagaaatggcaatatattgagtacttgattaaaactgaaaatccttaatacttttaatatatacaataatattttaaaaattcaattatatatttttctattataaaattagaatataatatttaaaaatatttttaaattaaaataaataaaatttgtttggaagataattttctacctttttagacaaactcatattagaattctgcaaccttattgtctcccacatctctatgaaaaagtttttaggcaattctatcttcaaagcagttggttggacctatgatgcagatcctaccattcttgagaaaaaacaagttattatcggttttgaacatacttctaaccttgatgcgatcttatcaatcgctttgtttcaaatattagatttaaaaattcatacactaataaaaaaagaacttttcaaaggtccaatgaagcctattcttgaaaagctaggtggcattcccgtagaccgaaaagcaagcaaagatatcgtctctcaaatggttgaaaaattccaaagtagcgatacattcaatctagtgattgcacctgaagcaacgcgtgccaaagatggatcggaacgcaaacctattcgaaccggtttttggcatattgctaaggcagcaaatgttccaattgtactgatgtatgcaaatgcaagaaccaaaaaaggcggtattttaggtaagatttatcctacggatttacagaaagatcttgaaacgattaaagaactttatgcgcaatatgatattgatgtgaaaattaactagctaactctctcatgaagtttgagcctatatttttatgtaaatttaggctctctgagcttatttaattggctaacaaaacgtaaggcaacagttttcaagaaaaccatgcctatgctaatattctgtcacttttgcattttttaatttttggagttcacttccatggcgggtcattctaaatgggccaatattaagcatcgtaaagcgaaacaagatgccagtcgcggtaaagtttttactaaatatattcgtgaaattgtcactgctgcaaaacttggtggtgcagatcctgccagtaaccctcgccttcgtgccgttgtcgaaaaagcgctttctgtcaacatgacacgagataccattaaccgtgcaattcaacgcggtgtgggtggtgaagataatgatgatttaaaagaagtaacctacgaaggttatggtgtaggtggtgttgctgttcttgttgaaacaatgacagacaacctgaaccgtacagttccagatgttcgccattgtttcagcaaaactaatggtaacttaggtaccgcaggttctgttgcttacctatttaccaaacgtggtgagattacttttgacgatgtttctttagaagataagatcatggacgttgctttagaagctggtgcagaagatattgaagtttcagaagatgaaattttagtaatcacttctccagagacttttggtgaggttcaagatgctcttgcagctgctggtttaaaatcagacaatgctgaagtagtgatgagcccttctactaaagcagaaatcactgatattgatcaagctaaacaagtaatgaaactcattgatatgcttgaagatctagacgatgtacaaaacgtttatacaaacgttgagtttagtgatgaagttttagcgcaacttgatgcctaagacgagaaaacgcaccaaatggtgcgttttttatactttatttaataagttataacagttaaatacattgtattctttaatgacaaagctcgaatgcagagcaacgacattatcaattttaccaatccgtcttaataaaatttcgctgtagtcgtccatattacgtgcaactaattcaagaataaaatcggcgctttgaccagtcaccaaaaaagcatttgttacttcaggaatggcttcaatttcagaaagaaatttatcaaatgtctcactatcatgcttgcttaaagagacttgtagcaaaatatgcaaagtaaaacccaatttgctaaagttaatttctcttttgagttgccccatgatattagcttcaatcaagtgtttaattcggcgatgaacagaactaactgaaagattaatccgttctgaaagctcattcaaattcaggtcttcatgagacaaaatttccagaatttgtttatcaaaacggtctaactccattctttgctccaattaacacgctttataaattacagtatatcctaaagctaagcctactttggaaatcaaatatcattaaaagagagaattaagctttaccaccctcttaacttaacttttgcttgttaactgtgcagtagtatagcgttcatagcgcattttcaattacttatagcctataactcttcaatgatttaattagtatatgaataaaagcatatttaatttttaaaaatcttataatttcttaattaaaatcaatgagtttaaacaattttaaaaagttggcactctttttgttatgcacatattggaaatcttttatatccaatgtggggaatgcctgtgaaaaatatcaaaacattaattcttgcaatgagcactatcagcttaaccgctgtagttatgccagctcatgctgctactgatgcagaagtagatgctttacgcaaagaagttagtgagttaaagcaactggtccagcaattatcaaatcagcaaaaagcggtaactgtagtaaatactccaaaagtgccgtcaactacaattgcagcaagctcacccgttcctcagagcaaaccgggttggatgcaaatgcctgatggccaaacgcaagtcaagctttatgggaatgtccgtgtagatgcaacctatgactttaaagggtcaaatggcagcatttcaaatggtgctaactaccctttaaataaagatgacccaagacaggactcattaaatgtatctgcagcgactacacgcattgggttagatcttactcgacctacacaatacggcgatttaacaggcaaaattgaagccgattttatgggaggcaatggcgataatggcagtggaactttccgtgtacgccatgcctatatgtctttaggcaaatggttagctggtcaaaccacttcacctttcgtcaatacagatacttctccggaaacactagactttaccggtgcagtaggtacaggaaccacacgtactgtacaggttcgctatactcaaccaattaatgctcaacaaaaaatattagttgccttagaaggtggtgatgttgaaaaagtgagtaatgctgctggaggaagccgtttccctgctctaacaactcgttatgatttcaaaaccgcagataataaaggcttattacagcttcatggtcttgcccatgaaaatcgagtagcgcctaaaaatagttcatctgaagaaaaatttggctggggtgtaggcatcggtggcaagtacgatatcacgcctcaggatagtgtcgttgccaactattatcatgttaaaggtgatggccgctatttatcttatagcaactctgcatatgcatacgatacaactactcaagatatcaacttaggtgaatttgatagtgcggtgatcggctaccaacggaaatggagccctattctccgctctactttcgcaataggtggtattcaatataaagatgataacgtctatgcaaatagcaatttaaccaatactagctataacaaagaaatttataacgctttggtcaacttaatctggaatccggttaaaaatattgatttaggtgcagaatatacttacggccagcgtgaaacttttgcaggtgataaaggtgattactcacgcataaatttattagcaaaatataatttctaaaatttagttgtaaaaaaaagagccactcatggctcttttttattgtcacaattagtgcattgcctgaattttttccaagaaaattttagcgcgctcatgacgtgcctctaaattatcaaagaattcatgggttgggcaatcttcaagaattttaccttcatccataaaaattaaacggttagatacgcgttttgcaaagcccatttcatgtgttacacacatcatggtcataccttcatgagcaagttgcaccatcacttcaagaacctcgcctaccatttctgggtcgagtgccgaagtaggttcatcaaacaacatacagattgggtccattgataagccacgggcaatagcaacacgctgttgctgaccaccagaaagttgccctggaaatttatccttatgggcaagcagacctacacgttctaaatatttaagacctttttcacgcgcttcagcaactgaacgttttaaaacttttacttgggcaatggttaaattttccaaaacagtcatgtgaggaaaaagttcaaaatgctggaacaccattcctacccgagaacggaactttgcaagatcagttttcggatcttttagtgaaaccccatcaacaataatgtcgccttgctgaaacggctctaaagcatttacagttttgatgagcgttgatttgcctgaaccggatggcccacaaacaacaacgacatcacctttttcaatactcgtcgtgcaatctgttaaaacctgaaaatcaccataccatttagagatatgttggatgtctatcattggcatttaaaatctccaattagcgaatgatggcaatttttttctgcaaacgtttgactaattgcgatagcacaaacgagctacagaaatacaccacagcgacgattaaatagaatgttgctttcgtttcaggaccataggtattagccaaagtatctgcacgacctaagaagtctggtgcactaatgacataaactaatgacacatcctgaaatagaatgatggtttgagtaagtaataccggaagcatattgcgaaaggcctgcggtaacaccacataacgcatggattgtccataggtaaaacctaaagcgtagcctgcattgacttgcccttttgaaatagactgaatacccgaacgtacaatttccgagaaaaacgcagcttcaaaaatggcaaaagtcacaacgctggaaaataatggcccccaatacgtatctgattgaaactcaaatatctttggcaacaagaaataaaaaataaaaataacctgaattaatgggataccacggaataaatctacatagaacttggcaaagttacttgcaagggcgttgttggataaacgcatcattgccaaaggagttccaatgaggatgccccccatcattgcaagcacggttacggtaagtgtaaaaataaatccttcttttaatgccgcaataacatcaggattatgcaatagagaaaaatccataattattttcctcccgagcctaaacctggtacagccatgcgtttttcaatccatgccattataaatttaatggtgtatgtaatgattaaatagacaggtgtagacagaataagaatgataatgtcctgtgaagtctcttcacgcatggttttggtataagcaaagaaatttaaaacacttaaggcatataaaactgccgagtttttaaagacgttcattgcttctgacgtaatcgttggccataccgtacggtacgcaactggcaaaatcacataacgataactttgagcggtggtaaatcccatagctgatgccgcaaacttttgaccacgagaaaccgtgttaattcctgctctaacatgctccgaaacacgcgccgcagtataaaggcctaaagcaaaaacaccgataacagcgggttgttgatttaaaatgtttttccaccatccccctgctacaacatctccacttcctgcacttaaactgtccggtaagaactccggaaaaacaaaagcccagaagaataactgtacaattaatggaatattacggaatatttcgacatagcagttgccgataaaagcaagtggtttattgggtaaagtacgaattaccccgaggagagaacctaataaaaatgcgataagaaaggctacaatggcagtccaaaccatagtaaagacaccagaacctaacatttgtaaccatgtgggcgcctcagcataggcattgtagctagaactaccaataaccttacaaactgattctgcccatgcggctttatcgacaccatattcattagactccgcacagaatatagtccagtttagtgagccgactgacatgtttgccccttaaattaatatctttagaaaatagaccacttgtgcaaatgaatttttacacctgcacaagtaaatttaggacaaaaagatccagttagattcctgcatctgttgggtgagctttgagttttttataagatgaactttgttgcatgttcaaattagtatttttcggtggaattggcgataagaaccattttttatataaagcatccatttgaccagttttccataagttatttacagtacggtcagcaattgctttaaattttggatcatcttttgcaatcataatgccataaggttctgatgaaagtactggaccaacaattgcaaatgctttaggtgtagaagacttagcaattaagcctgctaaaatattatcatccattacaaatgcagcagcgcgtccagatgccatcatggcaaaagagtcagcatggtctttaccataaatattttgtacattaattgcttggcctttttcattcatcttaatgtacttgtcagatgtagtaccttgagtagtaacaactgctttaccatttaagtctgccaaacttttaataccagagtttgctttaacagccatgcgtacttctgttgcatagtagttagttgagaaacccacttgttgctgacgctgtttagagtttgtggtggtaccacattccatatcaatattgcccgctaaaagctcaggaatacgtgttgatgaagttactgccttgtattcaacttttaaaccaggcattttcaattcttttttaatatcatttgcaaactggttacaaatgtcgactgcataacctactggtttacctgcaacaacatatgaaatcgggtcagacgattctcgatggccaataacgattttcccagtacttttaattttagctaatgtatctgctgcctgaatttgagaagtagcaccaaccgtacaaagcataactgttgaaacaatgagagaggttgcagaacgtttcataagaactccttgatgatcattccctctatttgtctacagaatcattcatatagagaaatagagtgatttattattaaattgcaattatcgagccaacttttccaagtaggacacgtccatttgcttcacttattatttatctgtttcgcagaattaatacctttaaaactgctcacatgtttctactttaatctatgttttaatcttctgtctattattaagctcatctatttacacttaaatgtggcaattattgattacaatgtaaacacatgcacaataaagtggcttaaatttttctaaaaactgtttttagcaaaagtaacttttatcccaaaaataaaagatcaaatttattagtagcttatacttaagttgaataaacagtaataaatattaaattaagcatcaaaataatatacataaatgttttattaaaaatcatttataaaattgatagtaatattttttaagtatctttaaagttaaaaaataaaaaagccccgattttatcggagcttttttaaaaactaaaatttaaattcctcgccaatcaacgcgtgcattacgttcagtttgatatattcttaaaacgtactgtccaagcggcaaatcaagtaaatatttctgataattactccaatcgggcgatacttccccatcttcttccctttcccatggtgtaccttttatttctaataaaggtgcaagcatagaacatactgaaatatcagcgaggcttaagcggtcaccaaccatataacgtgcttggttttcaattaaatagtggtttaactcattaataagttcatccatgcatccttttgactgacttacgagctcttcttcaagcttatagttcttcttgactagagtcttgagaaacggttttgatattttctcaaactgtcgtaagtagccttgttcacccatcataatctctagagcatgatcaccttgagctaaagtatgagcaagtgcccaacgacgtacatgcaccccaagttcatctgccaaactatcaattttaagagtttgctgtctaagttgttcatcacggcgtaaaagtgcatgttccggataagtatcatccagataaagcgcaattttagtcgactcagcaatccagcgatggtcatcttttaaaatcggcaacaaattttgacctgttttaagttgtgcaaaagcacggtgaaatccaggaatcaaattatgtgcaacgtaatcaagttctttatggtctaacaaccagcgagctttttcacaataatgagacaaaggaaactgatacaaaacccgcataaaatctccacgtttatttttatttgactattcgtacaaaaatcgtcttcggtaagtagatactttagaagctatttttaatgaaaacaatggatattgtgctcatttttcactgacagttaggtctatattttttatatctttttttaccgtacttatagctctttttcatattaaaaactttttagttattcattttacaaataaaaattataatttattgatttttaatatatttctatatctatatttatctattaaaaatcaaaaaaagtgctttgcatttttattcataagctgagcataagtcctcgtttagtggaaaaatatttcttttgtaaggtaatgacagcaatacaaggtgtcattatgtctaattctctatctaaaacgacggcatacgtccaagtcattcaaaatgatcaacaagcaattaatgctgcttatcaagtggctgattttgctttagagggtcgtaatacacgtgatcaacaacgcttattaccgcaagagcaaatcgaaagctttagccaaaaaggcttaggcggaattcgcattgcaaaaaaatacggcggtgcttttgtttccaataaaactttggctcaagttttccgtattttgagtaaaggcgacgcaaatgttggtcagattccacaaaatcagattagcctgttaaacctgattgaaatcatgggtacagaacaacaaaaacaatttatcttttcagaaatattagccggtaaacgtcttgccaacggtggtcccgaacgaaatacccatgactcaaaaaccttaaaaactactcttactattgaaaacggcaaatatattttaaacggcgaaaaattttattcgacgggaacaagttttgcgcattggcttgcaattaaagcgattcatccagaaggccatgtcgttttagtgattgttaaccgagatgctcaaggcattgaagttattaatgactggaatgggtttggtcagcgtactacagcgagtggtacggttaaattaaatcgagttgaagttaatcctgaacttatttttgatgagcgattattaacacaagttccaacctatcgcggtgcgtattcgcagttattacaagtggcaattgatgtcggtattgcggaagctgcttttgaagatactttatcgaccatacacaaagcgcgcccaattattgatgcaaatgttgaaaaagccagctttgaacattacaccctacaagaggtgggtaagttaaatattttactcgacgcagcaattttactgcttgatgaagctgctgaatatttagatgaacttgatcaacttcaaacagtgactgacgaacaagtagcaaaagcttcaattttggtcgcagaagcaaaagtctatgccaatgatgcggctctacagatctctgaaaaactactagagctaggtggtagccgttcaagcttaagccaacacaatttagatcaacattggcgaaatgcccgtgtacataccttacacgatcctgttcgctggaaattacatgccattggcaattattaccttaatggtcatttccctgcccgccatgcctggatttaaggagcaattgtcatgacttcatatcaatcggttcaaaccaaacaaacatcggcatcaggccaagcacatattattcaaaatgatgcggaagctttagaaattgccaaacaatttgccgaacaatttaaaaaaaccgcagttgagcgagacgctaagcgaattttaccgtataccgaaattgatgcattaagccagtctgggctttgggcaattacagtaccaaagcaatatggtggtgccgaagtttcaagccatacagttgctcaagtaattgcgcttttaagtggtgcagacggttcaatcggacaaattccacaaaaccacttctatgcattagaagtgttacgcaatacaggtacagaaactcagaaacaacgtttatacggcgaagtgttaaatggcacccgctttggtaatgcacttgctgagtttaaaactaaaacttcaacccataaacaaactaacattcgtccgcatgaaaatggctatcttattcagggtgaaaagttttactgcacaggaagtttatttgctcaccgtatcccaaccttagttttagacgatgcaggacgtgagtatctggcatttgtaaaaagtggttcacaaggattaaaacttgtagatgactggtctggctttgggcaaaaaaccacaggcagcggtacagttaaatttgatcaggtttttgtcgatgcagatgatgttattccttttgatacagcatttttacaaccaaccttagtcggtccttttgctcaaatcatgcatgcatcgattgaggtaggcattgcacgtgcagcctttgaagaaagcttgcaaagagtacatcaagctcgcccatggattgattcaaatgtagaaactgcaaaccaagatcctttaacgatttatgaattaggacgcattgcggtagatgtacgagctagtgaagtcctattaaaacaggcagctcaatcaattgatgccgcaaaaattgaaacctcacctgaaagcattgctaaagcatccattgatgtggctaaagtacgtgctcatagtaccgatatcgcactcaaagcatcgtctaagctgattgaacttgctggtagccgtggtagtcagtctcaagatggcctagaccgtttctggcgtaatgcgcgagtacataccttacatgatgctgcgcgatggaaatattactttattgggaactacgttcttaacggtgttctaccacctcgtcgggggacattgtaatggcagactttaaagcgaaagagattttattaaacgcctttgacatgaactgtgttggacatatcaatcatggcttatggacacatccacgtgatgaatcacaccgttttaacgaattgagctattggacagaacaggccaaaactttagaaaatggtttatttgatggtttgtttatcgctgatattacaggtgtgtatgacgtctatcaaaacggtatagacctcactttaaaagagtccattcagcttccgagccatgacccgtctacacttatttcagcaatggcggcagtcactcaaaacttaagttttggggtcactgtgaacttaagctatgagcatccatatcaatttgctcgccgctttgcgagtcttgaccatttaactcaaggtcgtattggctggaatatcgtgacgggttatctagatagtgccgaacgcttaattggtcaaaaaggtttaaaagaccacgatgcccgctatgagcaagctgaagagtttttagaactttgctataaatattgggaaggttcatgggaaaacgacgcagttaaaaaagataaagcacggcgtgtttttacagatccatctaaggtgcataccattcaccaccatggaaagtattaccagagtgaaggtgtgtttcaggtatctccttctgtgcaacgcactccaaccctatttcaagcaggtgcttcacctaaaggtatgcagtttgcaacacgtcatgctgaatgtgtatttattggcggtgacaaacccgaaaaaattcgcgaacaagtgaaaaagattcgtactcttgccgaacagcaaggacgctcagcgaatgatattaaagtgtttgtcggcataactgttgttgtggccgaaacacatgatctggctgtacaaaaacttaatgaatatcgtcagtatgcaagtcctgaagcaggcttagcgcattatgcgagttcaacaggcattgacttaagtaagtttgctgacgatgaagcgattccttaccaaaaaagtaacagtattgtttcaattactgaaaagtttaaagaacagcaaatcacaaaaaatgacttaaaagctcaacatgttttaggcggtcgctatccccttatcgtgggtagtggcgaagaagttgccgaatacttaattcatcttttagatgaaactgatattgatggctttaatttgacacgtactgttgcacctgagtctcaccatgactttatacgcttggtcattccagagctacaacaacgtggtcgctataaaactgcatataaaacgggttcactacggaacaaaatttttaatcggggtgatcacttaccagaacagcaccctgttcaagcgttccgatgtagtccctataacaacagcaaaaacttaacaaaaattgaagaaataaccgcttaaatttggagatagacatggctcaaacagcctctaaaaaatggctaggcataggcttagtcgttgtagtcctttttgttgctttgttcttatggaataaacatcgtcaaagtggctcaaatgaacttgtgattggcattagtccaccatttgcaaaacctttacaagctgctgccgatgaagcaaagaaacaaggtttaaatgtaaaactggtcgaattttctgactggaataccccaaatattactttaaatcatggggatattgatgcgaactttttccagcatcaacctttcttagacaacgcaattaaagaaactggctttaagttaaaggcatttgcagtgggtgcagcctcacatgtgggactttattcaaagaaatataaaagtcttgatgaattgccacaaaacgcacgcgtagtcattccaaatgatccggtgaaccaaggtcgtgccctacttcttttacaacaagctaagttaattacgcttaaagattcaaataatcacttatctgcactcaaagatgttgtttcaaaccctaaaaatttgcaatttattgaggttgaaggaccacagactgctcgtgcaattgatgatgttgacttggcttttggttatccacattacttgcgcttagcaaaaacagcagaccctaatagtgcgcttttactggatgacaataccaataaacgttatgccattttgtttgtagtgcgtgatgactatgaggataagggcgacaaattaaagaaatttgttgagatctatcaaaactcgccaaaagttaaagctgtgttagacgctgaaattgggccaaaactttggttccctggctggaagtaataacggaaagattatggcgattcagttcaaacagcataagccttggttactcggaattacgattttaatcgtagttctgggccttgtcggttaccgttatattaaaaataaacaagccgatgatgttttaacgattggcattagcccgccttatgcagagctattacaaagcgttgccaatgaagtagaaaagcaaggcgttcatgtcaaactcgttgaattttctgattggcgagcacccaatgttgccgtacaaaacggcgatattgatgcaaactttttccagcaaagcgtatttctacgtaatgctgttaaagaaacgggttatgacttacatgcatttggtgtgggttcaggaagtcatgtgggtttatattcaaaaaaatataaatcatttgaagatttacctttaaatgcacgtgttgccattccaaatgatccggttaatttagcccgtgctttaattttattgcatcgtgctggcttaattcagcttaaagatataaataatgaactttcaactactcaagacattattgctaatccgaaacagctgagcttcgttgaagttgaaggccctcaaaccgcacatgcatataatgatgtcgatttaattttcggcttccctcactacttaaaaatggcaaaggtaaccgacccacatagcgcattatttttagacccaatcgataaaaaatatgcaattttgtttgtgacccgtcgcgattaccaagacaaaaaccaaaaacttgcaacctttgttaaagcattccagaactcaaaacaagcacaagacattctggataaagactttggtaaaggtatgtggtttcaaggctggaaataaggagaatgacgatggtgagttttggatcacaagttgatttttctctaccccatatcaaaattcgtggtttaaataagttttaccaatctcaaggtcaaaaactgcacgctttaaaagagattaaccttgatattcctcaaggtaagattttaggcattattggtaaaagtggtgcaggaaaatcttccttacttcgtacattaaatggtttagaacaagtaaatactggcagcattcatattcatcaacaaaacattgctgaattgagccattccgagcttattcaaacccgtcaacggattggaatgatttttcaacatttcaatttaatgtctgcaaaaacagtttgggaaaatgtggcattgcccttaaaagtttccaattacaacaaagcagatatcgaccaacgcgtaaatgaggttctggctctcgtaggtcttgcagataaatctaactattatccatcacaactttctggcggacaaaagcaacgtgttggtattgcacgtgcacttgttcaccacccagaaattttactgtgtgacgaagccacctcggcacttgatcctgaaagtactgccactattttggctttgcttaaaaagattaatcaggaacttggtctcaccattgtattaatcactcatgaaatgcaagtgattcgagaaatttgtgatcaagtcgtggtgattgaccaaggtgagattgtagaggctgggcaagtttggtcggtattttcacgaccagagcaacaaattactcaagaactattaaaccttgagcaaattaccctgccttttaaaatcagccgtctacccgatgaagattcgactcatattattgtaaaactgaaatatgaggctgaagcacatcaggttccagatattcaagaactacttgccagatttaaagcacccgtcaatttatatcaaagtcaggtcgataccattcaagggcacattattggctcacttttagtcggtattcctaacgtagaaattgatctttcatctatacaacaagatgcattaacagcaattgcacaatttgaggtacttggctatgcaagaccagctcattgatttattaattactggaactatagataccttgctcatggtaggcgcatctgcattcattgcctttttaattggcttacctatcgctgttattttagtcagcacttctgaacatggcattcatccgtcgcaaaagattaatcaggctttgggttgggtcatcaatatcactcgctcagtaccctttctaattttaatggttgcacttattccgcttactcgctggattgtgggtacaagttatggcgtatgggcagcggttgttcccttaacgattgcggctattccgttttttgcccgtattgcagaagtcagcttacgtgaagtcgatcaaggcttaattgaagcagcacaagccatgggttgtaaccgtaaacaaattatttggcatgtacttttaccagaagctttgccgggtattgtggcaggctttacagtgactattgtgacaatgattaactcatctgcgattgctggtgctattggtgcaggtggcttaggagacattgcttatcgatatggttatcaacgttttgatatgcaaattatgttggctgttattttagtattgattgttttagtcatgttagtacaagcgactggtgatgcattagcccagcaactcgataaacgtaaagtttaaacacaacagaaccctgctctagccatgactttgtcatggctttcatgtaaaatcagccacaatttttaatttacacatttgtgagtggttttcatgggttttaattgcggtattgttggtctgccaaatgtagggaaatctacccttttcaatgcattaactaaagcagcgattgcagcggaaaacttcccgttctgtaccattgagccaaacacaggtattgttcctgttccagatccacgtttagataaacttgctgcaattgttaaccctcagcgtgttttgccgaccactatggaatttgtggacattgcaggtcttgttgctggtgcatcaaaaggtgaaggtttgggtaaccagttccttgctaacattcgtgaaactgatgcaatcgctcatgtggtacgttgtttcgaagacgaaaacgtgattcacgttaatggtaaaattgatccattagacgacatcgcaactatcaatactgaacttgcgcttgcagaccttgagactgttgctaaagcaattttacgtttaactaaagttgctaaaggcggtgacaaagaagctgtagcgactaaagcagttttagaaaaaatccaaccattacttgacgaaggtaaaccagctcgcgcggctgatttgtctgatgacgaacgcaaattaatccgtggttttggtttaatgactttgaaaccaaccatgtacattgcaaacgttgcagaagacggttttgaaaacaacccacatttagaagctgttaaaaaacttgctgccgaagaaaacgcaattgttgtgccgctttgcaaccaaatcgaagctgaaatttcattattagaagatgaagatcgtgctgagttcctagaagcaatgggcatggaagaaccgggcttaaacgtagttattcgtgcaggctataaacttttaggtttacaaacttatttcactgctggtgtacaagaagttcgtgcatggacagtaaaagttggtgcaacggctcctcaagcagctggtgttattcatactgatttcgaaaaaggctttatccgtgctgaagttgttgcatatgatgacttcgtacaatacaacggtgaaaacggcgctaaagaagcaggtaaatggcgtttagaaggtaaaacttacgttgttcaagacggcgatgtaatgcatttccgttttaacgtttaagttaaagcttaaaaaagccccactagattggggcttttttatatttaatggcttaaatccatcatctctcgtttactgcgcgcctcgtgtaaaattcgctcatgtaaaggctttctaaagcctaacataaatataaattctgccaatacaaataaaggtcctatcgcgagtccaatcacatcatcaacaaaagcaggttttttcttttcaaaataatgccccacaaactgaaaagcccatcccaccacaaagaaaccaatacttgcagccaaccaatgtcctaaagacaattgagcaatttggctcgctagtggatacacagcaaccaagataatgagcatgagtaaaccaaaaactttatctagaaataaataatagatcgtactaactgcaatcagtaccatagctaaagtaactttaaaattaccaatatcgattcctgccctcgctgttaaacataaaattgaaaacacgatgagtggaatgcctataaaatgcgtcaaaatattttgatgatttaaatgataagccgcatattggctcagtttctgttccagatttgacataagttattccctattcaactaactatagccatactgtacaaataaggaaaatttaaagttgtcagctatttgacaaagtaatgaattttttcatggatgggctgatattggatcttatttatattaaccgattaaaagaaaacacatggtttagtgtgctgccggaagcattccaaaagtttattctagaatatggcaagcaaattacttttgagaaaaacagctatgttttccacgctcaagatgagtttgatggtatttataccgtccttgaaggctcaattagtttaggttatgtcgatgtaaatggtaatgaagcactttctgcaattgctgagccgattatgtggttcggtgaaatatctttaattgaccatgaaccacgttcgcacgatgcgattgctttgaaaaaaagtacagttctacatattcctgcaaaaccattaaatgagctactaaaagaacatccatattattggtattattttgcacgtttaactagccaaaaactcaggtacgttttcttagaacagattgcgatacaaacacgcagtatttctcaaaggcttgcacaacgtcttctgttcattttagaaggatacggtaaccatattcttattcaagatcatcacattcagatttctcaagagcaattagccaacatgctaactacatctaggcagacgatcaaccatgaattgagcctacttgaaaaacaaaatattattaaaattgcttttagaaaaattgagattttagatattgaaaaattaaaagtaattgctcaagttcattcataattgtacgaaacgccgctatataataaaaacttaaaattaaattaaaaaattagataacactgcaaatcaaaacattgttcaaactctatttccacaaaataaatgttttaaagcagaatttttcaccttacactcaagctgagcaataatactcgacaaggcgctgattaacatgaaaaaattatcaacaattcttacagcaggcgtattggctatgttaagtgtttcggcatttgcatgtccaaaaggaactcaactacaaggcggtactggaccaaatcacaaaggtggaaagtgtgtagcggtacatggaaaagctacagctcaaaaagcaaagaaagaggcaactaaaactaaacaggaagttaaaaaagacttaaccatgcaaaagcatgatgcaatgaccagtgcgactcatgcacaacatgaatcacaccaaatgactcaccaaatgaagcaagatgctgtaaaaactgccaacacagctaaagctgcaacaaaaccgtaattatcattcacccattatcgtttaaagcaaaaaagcgagattgatcatctcgcttttttatatgtataggctttatttaggagatgtgtttcctaaattcggattttcaatggcttccttacactgttgtttatcgcgctcataatctgcctgtttttgagcaaccgaactattattttcaagcgtttcgcgcgcccatacatctagactcgttaaagctttacggcaaagtgcatattttccttcagtgactgaatctgtcatttttacattgatacgccagtctgtactgagctgacgtagtggcttacgaacattatcattaatttggctgagctgtttttcatagactaaatgatcaacagtattgattaatgtccatgccttttttgcataaactgtcgcatcattcgttagtttcggcgctggtttaatttctacttttttatctgagctctgattgccattatcacaaccttgcaatataaatacgctcgcactcaagatggcgatataaactaaacgagtctttgatttgaacatatcaaactgccgaattaaacatttcggcactatgctattaaattcggctacaatactcaatctttcaagtttttataattggtttactgccaaggtgtattgtgtcaaatcaacaacagatggctgctcaaacagcaactttttggcaaggtgccaaagatagtcaagccatcgttctcacctacttaccagtttcttttgcctttggcgtttctgcatctcaatttggttttagcccatgggaagcattttttctttcttgttccatgtatgcaggtgcaagccaatttttagtggtcgcacttttagcaagtggttcttctatatggttaaccgctttaacagtcattgcacttgatatacgacatgtactttatgggcctgctctttataatttaattccaactaaattaaatttaaagaagacagccgtttgggcttggggtttaacggacgaagtttttgccagtggtatgatccaactttcacagcgcagacaacaatggtccgagtcttggatgttgggcttaagtctatttagctggatgtcttgggcaagtggttcattattaggtggtttatttgcagatcaagtcgcacaccttccaaagtttttacaagcagctttagacttcttattacctgctttatttttaagttttttattagcggcatttgaacgaaagcatagccttgtagttgctgtatcgttagtggtttcagctttggcatgttattggattaacttatcagcggctatctttattggcattctttcaggcattttagcaggtctatttaaacattatgtgctgaaacaatttgatgaggttgaaacttaatatgaacctagaaattattttggtcggcattattgtgggtatcgctaattttgcttcacgcttcggaccatttttcgtaatacaaaaactacagggcaaccaacaaagacgcggctcaatctggttaaaaatcgctttaggaagtattggtatatctgcaattagcgccatgcttgtggttgcaacccttccacctttacttgaaaccccaaataagagtttagcaatgcttatcggttttttagttttagcaggtctttattttaaatttaagaaaatcgtaccagcaactttaactgccgcaatcgtttatggccttatctatacttatttacctttataaatagataaactgatcaaccttatataatatataaatgctagaagtgattaagaataataacttctagcataaaaactcatttttgaaatttattaaaagataaatccatctagcgattagagataaaaatgtcacaagttaaaatttatgcaaatgaacgaaccattattcagtatcgcgaactgctctctcatgcgatccatcaagcacttattgaagaattgaagtatcccgtcgagaaaagatttcaacgcttcattagccttaaacctgagaattttatttatccatctgacagaagccagcattacattatcatcgaactttcaatgtttgcaggccgcagtccagccactaaaaagcaacttattcaaaccttatttcgcaatattgaagagcaatgcaaaattgcatctcaggacattgaaattaccatttttgaaacacctaaagaaaattggggcatccgtggtaaaaatgcagatgaattgcttttaaactatcaggttaatatctaaaaactacatttttaattgtccgacaaaattactttttttatgcatgataaggcttaactccaccctaagttctgctatgcttaaaaaaataattttgtcaggatgattcgcatgagcgtgacactcggtaccccacttcaatcttctgcatttaaagttttattgttaggttcaggagagcttggcaaagaagttgtaatttccctacaacgccttggtgtagaagtacatgcagccgaccgttatgatcatgctccagctatgcaagtagcacatttttcttatgtgctaaacatggcagatccagcccaattaaaacaactcattgaaaaagttaaaccaaatttaattgttccagaaattgaagcgattgcgacagaagttttactggaaattgaagcaaataaaactgcaacagtcatcccatctgctaaagctgtaaacctgaccatgaaccgtgaaggtattcgccgtcttgctgctgaagaacttggtttaccaacatctgcttatcgttttgctgatacgctcgaaagcttccgcgctgcttgcgatgacattggttatccaaactttgtaaaaccggtcatgtcttcttctggtaaaggacaatctcgtgtaaaaagtttcgatgaagtcgatgctgcatgggaatatgcaatgcaaggtggccgtgttaaccaaggcactgttattattgaatctcaaattgattttgactttgaaattacactccttaccgttcgcgctaaaaaccctgaaacaggtgaaattgaaacgcactactgtgacccaattggtcatcgccaagatgcaggcgactatgtagaaagctggcaaccacaaccaatgactcctgcagcactcgaggaagccaaacgcattgcaaataaagtgactacagcacttggtggctgtggtatttttggtgtagaactgtttattaaaggcgacaaggtttggtttagtgaggtttcacctcgtccacatgatacaggcctcgtcactttagcatctcaatttcaaagtgaatttgaattacatgcacgtgcaattttaggcttacctgtaaatacagcacgtcacagtgttgccgcaagtgcggtaatttatgctggagttgatgctaacaatttaagttatagcaatctgaatgtggctttagctcatccagataccgacttacgtttgtttggtaaaccagaaggtttcaaacgtcgtcgtatgggtgtggcaactgctcgcgctgaaaatactgatcttgcccgtactttagcgaaagaaaccgctgatcaagtaagcgttcaaactaacttttaatttttacttattggtagacccattttcatgatcaatacatcgccattgctgaactatgtctcaagtcatcatgatattaaagccattaatcagtggcgaacggatgtagaaaagcaattgcaagattcatacgaaaatgggcaatctattcgagaaatcattaaagctcgttcagacttagtagatgaagcgctcgtctttttatggaaacatgcagaacttgaccagtcaaaactaggtctttttgcagtaggtggttacgggcgccgtgaaatgctgccctattctgatgtagatatcatgattttgtctgaagatgaaatcagtgaagaaaatgaaaaacgtatctctacatttatttcctctttatgggatgtaggaaatttcaaaccaggtattagtgttcgtaccattcaaagctgtgttgaacaagccgctaccgatttaactgttgccactacattaattgaggcgcgtttaatcacgggtaatacgcaacttgcgaaatggcctcgccgtattgtttcacagacctggacagacaaaacattttatgacgcaaaaatggccgaacaagccaagcgttaccaccaacacaacaatactgaaagtaatttagaacctgacattaaaaatgcaccgggcggtattcgtgacattaatcaaattggttggattgccaaacgccacttccgagtgaaccgtatctatgacttagtgcatttaggtttcatttcagagttcgaattggctgttttagaagaagctgaaagctttctttgggaaattcgacatcatttacaccgtttagccaaacgtgatgaaaaccgtttactctttgaccatcaaagagaaattgctgctaaatttggttacgttcgtcaagaaggccaacctgtaaattacggcgttgagcaattcatgaaacgctactaccgtacggcgcagcaggtttcaacactcaatgaaatgttgctggcgtattttagtgagtcagtcattactcctcgactccccaactatgaacgcaaaattgaagttgttaacgatcactttaaaattgtcgataataaacttgccgtacagcatcacaaaatattcgcagagcatccaagcgcgattttagagttgttctatattttagccaatcgaccagatattgaaggtattcgcgctcggactttacgcttacttattcttgctgcgaaacgaattaaccaaagttatcgtgataatccagagcatcaagcactatttatgtcgattattcgctcaccatatcgactatacgacaccttggtcgcgatgaaacgttatggtgtgttaggaaactatattcctgcttttggccaaattatgggtcttatgcaatatgacctattccatatctatacggttgatgctcatacattattattgctgcgtaatttaaatcgttttagagaacctgaatttgccaaagaattccctgtggtaagttcggttttccaacgtcttgctcgtcaagatattgtctttattgctgctttattccacgacattgcaaaaggccgtggtggtgaccatagtgaacttggcgcagaagacgcgattgagtttggacgtgcacatggctttactgagcgtgaatgcaaattaattgcatggcttattcaaaaccatttgctcatgtcacttacagctcagaaaaaagatatttctgatccagatgtcgtgaaagattttgcagaaaaacttggcgacatggagcatcttgattatctctatactttaacagttgcagatattaacgccacaaatccaaaactttggaacacatggcgcgcttctctcatgcgtcagctttatacgcatgctcgtgatgtaatccgtaccggtttaggtcgtcctgttgattatcaaatgctaattgaagacaccaaatttgcagcaagtgaattactggtaaataactttgcattggctgatgtcgaaaaagtatggcaagaacttggtgatgaatacttcattaaagagtcggcagatgaaattgcatggcatacacaagcaattttaaaacatggtgataatccagagccattagtcctcttgcgtgctcaccgtaaagcagctcaagatgcggtgcaaatctttatttatacacgtgaccaacctaacctgtttgctactactgttgctgttttagaccgcatgaacctagacgttcaggacgcaaaaattatcacagcaagtaccgcatttagcttagacacttatgttgtactcgatcgtttcggtacattgcttaccgacccagagcgtgaagaaaccgttaaaaatgcattagtgaaggcgcttagccaaccagaccaatacccgggactcatgcaacgccgtattccgcgtcaattacgtcacttcgatatcgaaaatacagtcgatgtaacattgaatgaagccttacagcaaaatatggtcgaaatttcaacactcgatcatcctggcctacttgcacgcgtgggtggtttatttatgatgcaaggtttagacatccattcagcccgaattgcaactttaggtgaacgtgccgaagatattttctttgtcaccaaaaaagatgggaaaccgctgaataacgaagaggtcaaactcttctcggaaaaactgaaagcagcattagatgaagcatctaatcaaatttgtcagcactgaaactcaactacttggtaactgtttaatgaactctagcttgtcgttattacacccgtatccatttgaaaagttaaaccaactttttaaggatattaccccagcgaaccttcccttgattcctctatcaattggcgaaccgaagcatccagcaccagagtttgttaaacaggctattattgataactttaaccatctatccacttatccaaacagcaaaggcttacctgagcttcgccaaagcattgcagattggttaactaagcgctttaagctcaacagcattagtgctgaaaaccacattttacctgtgtctggtacacgtgaaggtattttctcttttgtacaggcattaattaatcgtgaagatgcaccttatgtggtaatgccaaacccgttttatcaaatttacgaaggtgctgctttacttgcaggtgcaaagccatacttcattaattgcacagaagaaaatggttatttaggtgactttgacgcggtaccagcagaagtttgggaaaagacagcccttctttttgtatgtacaccgggtaacccaacaggtactgtgctttctaaagaacaatttaaaaagctgattgccttatctgatcaatataattttgttattgcatctgatgaatgctattcagaactttggtttgaccaagctcctacgggtttattagaagtatgtgcggaacttggccgtgatgactacaaaaactgtatcgtttttcattcactttcaaaacgctcaaacttaccgggtatgcgttcaggttttgtagcgggtgatgctgctttattaaagccatatttgcaataccgcacctatcacggcgcagcaatgccagtacaacatcagcttgcctcaattgcagcatggaatgatgaaagccatgttgaagaaaaccgtaagcaatatcgtgcaaaatttgacttatttcaatctgagctaggtcatttgcttccattacaaaaaccagatgctggtttttactattggttaaaagtggataatgatgaaacttttgccaaaatgctgatggaaaaagcacatattaaagtcttaccgggccgttatttatctcgtgataccgaacaaggtaaccctggagctaaccatgtacgtatggcgttagtggcagatttagctcaatgtgaagaagtagttaagcgtttaaaagcgattctgtaagcctcttcttagcagttgtacagcctattactcaggttgtacaactgggctataacactatttatatgtaatcaaaagcacagcaaaaagaataaaagctagcgcagaacaataatataaacctgttgcagagcgcttaattttgactaaaattcgttcatgggccagcagtttaaccaataagatattccagattaaaaccacaccgaccatccatacactcataagcagtttttgaaataaactaaatttattttgtataagcagcattaagctactataaaacataatattttttggatttaaaagactcgattgcaaacctaataccaagcttttaattttgttgtgcttatcttctgcttggtcacttaaattatttacatcggttgagaaatttagagctgtagatcgggctgcattaaaacaaagaaaactcaaataagccaaatacaaagcgccaagccatttaaatattaaaagtaagatactacttagatttccaagcaatataaaactaaacaggcatccagccagaattaaagcatttcctaaagtgattcctagaacaataccatatgtataacggcgtcctttttgtagaagactagtgagaataagaaagaaatctggacccggtgataagagtgctaaaaaatgagtaaatgcaataactaagaaaacttccataacagcttcatctgtaaaacagtctggaaaatcttagaaatagagctaaacaatttcttgtaaattattgcgcggctgcgagctggaactgccgaggagttacccctgtatgtgctttaaaagctttatggaaatgactttgatcactaaaacctaaatttacagccaattcggcaagtggcacgccttgtttgagctgctctcgagcctgattaatttttaagttaatttgaaatgcatgtggagttaaacctacatttgctttgaatagacgtatgattgcatatctgcttaaacctactcgttgagcaagttcttctaaagaaataaaaccctctgaggaagaaatcacatcgatcaggtttaaaaagtctttatataaatattgaggcttttgtatttcttctaaaataaaatgaggtaataacaaatgaatcaggcaatggagaagagactgctctttttcaaaaattaatttttgcgcatcaaataatgtctcattcatttcagtaaaagcttcatataaagattcgtcttttataatgagcggcttatgctgaggtatatgtaaatcaagaccttgctcttgaaattctgaatacagttgatttaaccatgctagatctaaatgaagcatctggtaactccatgcctgatttggcataggattacatgaatgctcaacatgtgcgggcacaatgactaatgtacccgccgagatcttttgtgcagtgccaaaagaactttgaaaaacactattcccctcatctatagcaccaattgaaaatgttggatggctatgagacttataacatgttctgccaaaacatgaccttcgggtttccacataaggcattcgccgatcttgccaaaactcgaaagtttgaggaatagcgttcattgaacccattaactcgctaatgctttttcaatatcagcttccaatgcttcaggcttggttgttggcgcataacgatttaaaaccgaaccatctttacccactaaaaacttggtaaagttccatttaatagtactgcttcctaaaattccttttgcttcacgggttaaatatctaaagatcacatgagcttcaggaccttttacatctactttggcaaacatagggaatttcactccatagttacgctggcagaatgtacctatctctttattgcttccgggatcttgcccaccaaactgattgcagggaaaacctaaaacttctaaaccttggtctttatatttttcataaagtttttcgaggcccgcaaactgtggagtaaaaccacatttacttgcagtatttacaattaataaaactttacctttgtaatcagcgaattgtttaatatctccctctaacaattcagcttcaaactgataaatgttactcatggataggtttcctcatcatttttttcttgtgttttcagttgtaatgatgccgagttcacacagtagcgcaaacctgtcggctgtggtccatcttcaaaaacatgcccaagatgagcttcgcaatcatgacaaacaatttccgttctgaccataccatgcgttaaatcttcatgttcatcaataacgcttccattcagagggcgaaagaaacttggccaaccacaaccgctatcgtattttgcatctgacgaaaacaattccgcgccacaacaacgacaaacatatgtgccatgttgcttagtattccagtattgccccgtaaatgctggttcagtgcccttttgtcgcgttatccgatattcttcaggtgataactctctttgccattctcggtctgttttattaacttttcccatgacctgcaccttttattctgatgtaaacataaattgataatcgtattttatatttacgccattcatcaaaaaaacactagtctctgaacgtaaaatttgttggattttaaacatctaagtaacagaaagcaaaaagtaagcaaaatacaaaaacaaaagaaagcaattttttattttatttccttttaaggaagcaaagatggtgctattcttgtgtggcacggttgtataggacaaaacatgtctcagaaaaaaagtgtgcttttccagcaactattaccagttatcaaacagtatcagcaatcgggctttacccatgaaaaaattgttgaattacttaaagatcaacatgatctgaatttggtaacagtcaaaacatttaaaagttatttataccgatatgcaaaagtgaatccagctatgtctaaaaatactgctactctccaatccatgccaacttcccgagaaattaaaaaatcatcgaagcttgagcatgtttgttatgacattcgcggaccagtattacgagccgccaatgaaatggaagagcaaggacataaaatcattaagctgaatatcggcaaccctgccccatttggttttgaagcaccacaagaaattattaatgacgttgctttaaacctaccaaatgcaattggttatgtagattcaaaaggtatctttccggcacgtaaagcaatctgccagtactaccagcaaaaaggcatcttaaatatgcacgttaatgacgtgtatatcggtaatggtgtatctgaactcattgtcatggctatgcaaggcctactcgatgatggtgatgaaatgctcattccgatgccggactatccgctatggacagctgccgttaacctgtcgggcggtacagccattcattataagtgtgatgaagaaaacagttggtatcctgatattgccgatattgaaagtaaaattacttcaaacacacgtggtattgtcattatcaatccgaacaacccaactggttcggtatatccacgtcatgtgcttgagcaaattgtggcacttgcaaagaaacatgacctgattttatttgctgacgaaatttacgacaaaatcgtttacgatggcattgaacatgttgctgttgcttctttagcaggcgaccaattatgtatttctttcaatggactatcaaaagcatatcgtattgctggtttccgttcaggctggatggcaatcacaggcgataaaagccgtgcagcagactatatcgaaggtctggatatgttagcttcaatgcgtttatgtgcaaacgtacaagctcagtatgcaattcaaacggcgcttggtggctatcagtctattaatgatttgatccgaccaggtggacgtttatatgaacagcgtaatatcgcatgggaaatgttaaatgaaattcctggtgtaagctgtgttaaaccagaaggcgcaatgtattgtttcccgcgtcttgaccctaacatttacccaatcgaagatgatgaaaagttaatgttagatttacttcgtgctgaaaaagtactattagttcaaggaacaggttttaactggccaacaccagaccatttccgtgttgttttcttaccggcagaaaacgaattacgtgaagcaattggtcgtttaggccgtttcttggccaatcgccgttaaaaaaatgcataataaaaaaggtatcttaaattaggtgcctttttttatttttacatcatttaaataattatttaataactaatatcacctattttaatcagatcaataaaccaaattaatatactgaataatataaacttttaaaaataatatataagacttattttctcaaaaaatctcatccatatttttttaccaaacgtttaaattactatatttatcccctattcctcctttcgttattatgcaaaaaatgcataagttgatatttttttgcatttcacactgcttcaaaatcgagcaacaatcccttcccataacaacatcaccatattcgattcggttaatactgatgcaaatttaggaagatgaaatcagttacaggaccgaactgaactacaaggaaagctttcaatcatcgttatcccatctaaaagatgattgaacccaaaggatagaggttcctatgaagcaaaagaaattgctcaagtatattgtggttgctattttactaggagtattgacgggttggatctgtcatcacttctttaatgaaggcgagcaactgaagcaaatcgcttcttatttcaacatcgtcacagatatctttttacgtctcatcaaaatgattattgccccattggtatttgctacaattgtgtgcggcattgtttcaatgggcaaatcaacttcaattggtagcatcacactcaagtcaatgacttggtttattaccgcttcgtttgtctcacttgccatcggtatgggtttagcaaactttttccaacctggcgcggcgctagacctagcattaccaacagctcaacaacttagtagttcttctctcccaacaactactggttttaccttgcaatcattcttgagtcacgtgttcccacgcagcattgcagaagcaatggcgaacaatgatattttacaagtccttgttttctctattttctttggttcagctcttgcttttgtaaatcagggcaaagaaaaagactcagttatcattcgcttaactgatgaactcagtaaaatcatgtttcgcattactgactacgtaatgatgttcgcaccttttgcagtatttgctgcaatcgcttcagcaattacagtacaaggcttaggcttaattgttgattatggcattttaatcgcagaattctacttcggtctgctattactttgggtcattttgttctctgttggcgcaatcgtacttaaaaaagatatcttccgtttaggtaaattgatccgtgaacctgtaacacttgcttttgctacagcttcaagtgaatcagcctatcctaaagttatggatgctttaaataagttcggcgtgcctaaaaaagtgactagcttcgttttaccattaggttattcatttaaccttgatggttcgatgatgtacaccacatttgcggtactctttatcgctcaagcttacaatattgatctgagcttcactcaacaaatcttgattttgttaacgcttatggtgacaagtaaaggtattgcgggtgtttcaagagcttctattgtggttatctcggcaacactcacaatgttccatttgcctgaagccggtattctattattacttggtattgatcagttccttgatatgggccgtactgcaacaaacgtagtaggtaatagtattgcgactgcagttgttgccaaacttgaaggcgataaagtggctgatactgaagaattaccagagcctgtattaattaaatcaactcaagaacaaacaatcgcttaagtttcctttttctcccactctcccaacttaagagcaattttatacgaccttataaaattgctctttttttcttccaaactaaacaataaaaagttatcagtatttctctattaaataataggccaaattatggattttagttcctattaaatttcttaaaagtaaaccttaaaaacagaataaaaaaccatcattcaaaaatttatatatttagaaacacctactaaatgattattttttaattcaatttacgattgattcattatattaaacaactaagattattatttaattcgaacatgaaaaattttattttatattcttaataaatatagttttaaaaatcaattcaataaatccaccaaatgttaaataaaggcccaacccaacctattattttttaattttataaagactaaaaaatcatttgcgtgaattatattaaaaagtaaataaattcagataaattagaaaaacttaatagattttttatttttttcatgatatttattagcgctgaataaaagcaatgtttaaatgattgttgtcgaaacaaaatgatattcaaggatgcttttattcaaacaagttacggatatgttttacatggtatgtattttgcttaggaaaagcaggcgtattcggcaaactttatacttcgtcacttcataaggatattttcgatgttgactaaaactgttaaatctttcggtttagcgatgggcttattagcctgctctctcccactttacgcaaaaaacaatgttgttgttgtcgctactggcggtaccattgctggtgctggcgcaagctcagcaaatagtgcaacttatacggcggcaaaagttccagttgatgctttaatcaatgcagttcctcaaattcaagatttggcgaatgtatctggtatccaagcattacaagtagcttctgaaagtattactgacaaggaattattacaaattgctcgtcaagtaaatgaacttgttaaaaagccaactgtaaatggcgttgtgattacacacggtacagatactttagaagaaacagcatttttcttaaatcttgttgttcatactgataaaccaatcgtacttgttggctcaatgcgcccatcaactgctctttcagcagatggtccacttaacctttatagtgctgttgcattggccgcttctgatgatgcaaaaaataaaggcgttatggttctcatgaacgactctatttttgctgctcgtgatgtaactaaaggcatcaacattcatacaaatgcttttgtaagccaatggggtgctttgggtacacttgttgaaggcaaaccatattggtttagacaatctgttaaacgtcataccaatgcttcagaatttaatattgaaaatattaaaggtgatgctcttccaacagtacaaatcgtttatggttctgactctatgcttcctgatgcttatgaagcatatgcaaaagctggcgctaaagcgattattcatgcaggtacaggtaatggttctgtagcgaaatatatcgttccaacattacaaaaccttcatgacaaaaacggtattcaaattatccgctcatcacgcgttccacaaggttttgtgttacgtgatgcagaacaacctgactctaaatatggttgggtagcagctcatgatttaaatcctcaaaaagcgcgtattcttgcagcgttggcacttaccaaaaccaacgatgcgaaagaaattcaacgcatgttctggcagtactaaaattcctaaccagcccaaatcaatttgggctggttctttttatccgctttaattttctctttaaaaataaaagaacaactttgatcaatccttcactttcgtgttctcaaccttctgtttaaatactaaaatccataacagttgccaaaatattaagcatttcgtttgaactttgcgtgttaaactatgctgcggtcgcattaaggattggtttatgcagtttgttcatctcggtatttacacagaattttcgattacagagtcgattgttcgcatacccgacttggtcaagactgcggtaaaggatgaaatgcctgcgctggcacttaccgacttatccaaccttcatgctgctgtaaaattttataactcttgccttaagaaaggcattaagcctattttgggtagtacaattcgtcttaatgatgcccaacatcgtgcaactttgcttgcaatgagtgatattggatggaaaggactgaccgaaattgtttcgcgtggatttattgaaggtcaacaactcagtatcccttgtgtacaaaaagaatgggtcctagagcagcatcaagatattattgttttacttggccaacatagtgatgttgggcaaatgctttgctcatctaacccgcaaaaagcagaacctttacttgaagagtggattgaaaagtttggtaatcgtgtttatctagccttaacacgtactgatcgtcctggcgaagaagactttattcaagaagctgccaaacttgcagctaaatataatgttggtgttgttgcacacaacgatgtgcactttattgaaaaagaagatttcgaagcgcacgaagctcgtgtatgtattgcagatggttatgttttagcagatgatcgacgtccgcgcttatatagcccagagcagtatttcaaaacttctgatgaaatgattgagctgttctcagatattcctagtgctattgaaaacacctatcaaatcgctaaacgctgtaatgtcactttaaagctcggtacttactttttacctgagtatccaattcctgatggttttaccatcgatacctattttgagcacttatcaaaagaaggcttagaagagcgcttaaattacctttaccctgtcgaaaagcgtggtgaagactggcccgaaattcgtaaaccatatgatgaacgaatagattatgaagtcggaatcatcctgaaaatgggattccctggttacttcctgattgtcatggacttcattcaatgggcgaaaaacaatggtgtccctgttggaccgggccgtggttcaggtgcaggttcattagtagcttatagcttaaaaattacagatcttgatccacttcgttacgacctactcttcgaacgtttcttaaacccggaacgtgtatcgatgcccgactttgacgtcgatttctgtatcgcaggtcgtgaccgtgtgatcgattatgtatcacgtacttatggccgtgaagcggtgtctcagattgcaacgttcggtacgatggctgcaaaaggtgcgattcgtgacgttgcccgcgttttagggaagtcttatggtctagctgaccgtatttcaaaaatggttccaactaagccacttggtgtggatttggcaactgcaattgaaatggaacctcagcttaaagatattgttaccaacccttccaacccagataatgatgatgccagcgaaatttgggaaatggcattaaagttagaaggtattaccagaaatacaggtaaacatgccggtggtgttgttattgcacccggtaaaattaccgacttctctgctgtgctttgtgacgcagacggtactaaccgcgtagcacagtatgataaagatgatgtagaagctgcaggtctcgtaaaattcgacttcttgggcttacgtaacttaaccgttattgaagatgctattcaaaatattaataaaaaccgcgatagcaatgaccctttaaacatttcacacgtccctcttgacgaccctaaagcttattctgtctttgctgatgcaaatacaaccgcggtattccagtttgaatccgtcggtatgaaacgaatgcttaaagaagcgcgtccaagtaaattcgaagaaattattgcgttcgtatctttatatcgtccgggtccgatggatctgatcccagactttattcaccgtatgcatggtggagaatttgagtatcttcatccattgctagaaggtgtattagaaccaacctacgggattatggtttaccaagaacaggtaatgcaaactgcacagatttgtgcaggttacacactcggtggcgctgacttgctccgccgtgcgatgggtaaaaagaaacctgaagaaatggtgaaacagcgccaaatcttccttgagggtgctggacaaaaaggtattgatgaaagcacagctaaccatatcttcgactatatggaaaagttcgcaggctatggttttaacaaatcgcacgccgcagcctatgcacttgttgcataccatacagcatggttaaaagcccactatcctgccgaatttatggcagcagtaatgtcatcggaaatgcagaacactgacagtgtcgtatttttgattgatgactgccgaaataacggactcgaggtcttaccgccatcagtcaatatgtcgacttatcatttccatgcgagtgatgataaaaccattgtttatggtttaggggcaattaaaggtgttggtgaacaggcaatgcagtctgttattgactcacgtcgccaacaagggccttatactgacctatttgatttctgccatcgtattgatttgaaaaaaatcaataaacgaaccttagaagcacttatccgtgctggtgcgcttgattgtttaggtattgaacgttcaagtctaatggctcaattgccagaagctgtacaagctgccgaacaagcacgtagtaaccgtgaaagcggtattatggacttatttggtgaagttgaagaagttcaacgtaaaccagctaaacctgttaagccatggagtgatgaagttcgtctcaaaggcgaaaaagatacacttggactatatttaacaggtcacccaattgatgtttatcgtcaagaactcaaagcgtttattcctgcaaaacttaatgaaattaccgcaactcgtcgcggtgtaacgactgtttatgcaggacttgtccttgatgtagcgaatttcccaaaccgtgttgttattgtgcttgacgacggaacagcacgtattgaagtcagttgtaaccacgaacgtttccaacgctttaaagatattattcaagttgagcgcgtagtcgtctttgaaggcgagatctatgagcgtgaaggttttgatcgtccaatgggacgcttgaacaaagcgtttagcttaaatgaaatcagacaaaaacgcgccaatagtattcaaatcaaattaacccatgatctattgcaaccaagtttggcaaaagatctacaaaatatattattgccttattgtaatgtcgatatgcatcagcatattgcaatacagttacagattgaccaaccatatgctcaggctgagcttcagcttggcccacaatggaaagtcgctcctttagatgaacttcttgccaaactaagagattactttggtaaggataatattcatattgaatatcaggtaaaatctaaggcagctaaagcagcagaacctgttcgtccacaacctgttgcctcacctcctgtggacatgactattgatgatgcattggattcataccaaagcgaagtttctcaatattcgtaatttctggaaatcttatgagtttgtttgacgacaccgccgtgtcaaaacaattagcacaagtgcgtattgtcatggtcaataccactttaccggctaatattggcagtgctttacgcgcaatgaaaacgatgggcttgagtaagttggttctggtttcaccaaaaacctacccacatccagatattcaggcgcttgctgctggtgcacaagatttattagaacaggttgaaattgttgaaacactcgaagaagcaattaaagattgccatttagttttcggaacaagtgcaagaagccgtactattccatggcctttgttagatgttcgccctgcttccaaagaagcaatcaaggcggctgcacaaggacaacaaattgcgatcgtttttggacgtgaagaccgcggtttaaccaatgaagaattggctttggcaaactatcaccttactattcctgtgaactcggactatggtgtacttaacgttgctcaagcgattcaagtggtttgttatgaacttcgtatgtcggtattagagcaaaaagaagttgcttctgatgctgggcaaatgccgcttgctcaaggtcaaagcatgcaatgggatgagccgttagtgactcagcagcaaatggaagagttctaccctcatttggaaaaaatgctcaccgaaattgaatttttagatccagaaaatccacgtttactacctttacgcttgcgtcgtttatttggtcgtatacaattagatcgtatggaatatcatttacttcgcggtatttttagtcgagtccaagccctcacaagcggcaaatggaaaaaagcatcatcggacaaggaggatcaacccaatgcttaaacagcttaaagaagatatacaggctgtattcgcgcgagatcctgctgcacgaaatacactcgaagtacttaccacttacccgggtatacacgctttacttttgcatagacttgcacatgaattgtggaaaaaagattgcaaaggtaccgcccgttttgtttcgtcatttagtcgttttgcaacgggtattgaaattcaccctggtgctaaaatcggcaaacgcttctttatcgatcatggcatgggcgttgtaattggtgaaactgctgaaattggtgatgatgtaacgctataccacggtgttaccttaggtggtacgacttggaataaaggtaagcgtcacccaactttagaagatggcgtggttgtcggtgctggtgcgaaaatcttaggtccatttacggtaggtaaaggcgccaaagttggttcaaatgcggtagtcacaaaagcagttcctgctggtgtaacagctgttggtaaccctgcacgttatatctataaagatgccgacaaaactaaagataaagatgaagaacgtcgccgtgattatgcacaaagtattggttttgctccgtatgcgactactgctgatcaatctgacccaattttagaaggaatgcgagttttacttgaccgtattcagcacaatgaaacgcgtatgaataatttgtgccagcgtttgtccgaacttgacccaactttcaaaaaagaaagtcaagatgaacagccttttagtgatgaagagctaaaaattcttgaagaagttcgtcgtgaatgcggtgcgcaaaacaagacatcaaaaacgtaatattcttgattcataatgtaacacgcttacccttgcatgtcggtttaggttttcctagacttgttgtaccttatttaactttataaaatgaacggaagaacctatgaattttaagcctttggcatatatccttcttgcgacctcaagtttaacagcgtgtaccatggcacctgtaaaagaacaaaaaattgaaccgtttgtttttaaggaaccagagcttacacctccattttatgcattaaacccatttaattatgatgctccgcctgcatttgaagttgctttaaaagaagctgctgcacagcctgtaaccaaaatggttgtaactcgtcaggacgatccaaccaaaacacttacattagatacgaataaattgatcgtacctacagtcaacaactcacaacgttcaatgaagtacgcagttttagcgggcaataatgaaattgatgtaactgaaattgatgacttcttacaacttgttgaaggtaaagcgcgtcactatccgcctcgttttactgaccgtcaagaacgtaaaggctttgaaagcaaacttaaggaagtcactcagcgcttagatactttagctgctaatccagatgcttcatttgatattcttattcgtgcttttaaagcaagtgtacttgcccgtaaccttgatttaggtactgctcataccactaagtctttagaatatgcacaaagacttttaaaaattaatccagatgatgctgaagcgaatttctggtttggttttggcttatctgaaggtggtggtcaacgtgaggctattccgtatttagataaagctattaaaggtaatgttcaggaagcatatttagccgctgcaaataactatattgcaatggaacaaaagaaaaatgcgattcagactctaaaaaattacaaggttaaataccctgatgaagctgaagtagcagaccgtttaattcaagaaattgaaaaacaaggtcgctggaatgtatggcaagttttaacaaaccctgctatgtcttctgctaccccaagtgcagctacaaaaaagtaagcgcttaaactttataaaagggctgatttgacagccctttttttatgtttgatcaattgaaaaatactttaaaatttgtatgatcagcatattactgatccacatatttgaccataatgtttgttagaaaaagaaactcagcgctcttcacggtcatactcctcggttcaatcctgagtggatgtcaggtcgtcaatgttaagcaacaagctctcaacgttactattgcaaatgagcgtaatagtattcttacccaagataaactaagtgaagcgagtcttaatgttttgtccatgtcagggcaagaagctaaggcctgtacagactcccctgacacttgtgttaatcaacttaaaaatctgccccaaattttagatgaacagctgttatcggctgcgagtgaaatgtatctcgcaaaagcaatggctttgtcagattcttctgaatgtaaaattagtcgtttcactaaacataagccaactgaagaacaaaaagttattcaaaataaatatgatgaatgcttagatcaacagttaagtctactcgataagagtatccgttatagctatgcttatctgttttctacaaaacgtcagccgactgatcgtatttttgataatagacaagttcagatacgcgacttctataatcaagcgattgccaaaatggtcagtgtgtatgatttaagatatccacaaaaaaatgtggtagagccacaaatccatattggtaagagtgtatattcaattgattttgagtttcatagacaattatctggccaaaaattagaaaaattaatttcaagttataacttaaatttctcaggtttaagaacaatcaaccgtcgtgatggtttcggttccgaatttgtagctgtcttcccaagttcaggcaaagaagacattaatgaatacattttagatccacttaattacagctataaaaatggtgtaaatccaaatattcaccatgcacgttatttagcggcaactattgttgcagagcctaaacatgctaaaaccattcaagaaattattaatgacccagaatttgtgattcgggtctatgatccttatcgaactgataatattaatgtcgctggtaagcaatatcctttagctgcaaacttctcagctccttatggtctgtggttagctgaaaacaacctaggtgtagcggcttatttaagcttgattgatcgtgatcagcacttaaccatgccgcatttatatatgcttgaaccttataatccaaacaaaaaaattattgtgttggtccatggtttagcaagtagccccgaggcatggattgcgctcaccaacgatgtcatgggtgatactgttttaagagataactatcaagtttggcaagttttctactcgaccaatatgccaattctggaaagccggttccagatttatgcccttttgaaacaagcattcggttcgttaaacccaagtgatcctgctgcgcatgatgcggtgcttgtaggtcatagtatgggaggaattattagccgtttacttgtaagtgatgctgatattactaaacctgccttggagatgatgacgatccgtcagcaaaaccgttttaagaaacatcctatggtgactgaacggttgcaaatgcattcaattagtaactttgatcgtgcaattttcttggcatcgccacaccgaggtactgattatgcagatcgttggttcacattagctgcgcgtaaaattatccgcttaccgggtgcttttttatcagctgttgcaacttcgctcaccacagaaaatttagatattaaagatttcttgaataatattgataatggcctgattcaaaatggaccaagcgacttaagccatcaatctaaatttatggaactcactgagaatattaatccccatcaagggttaatcttccactcaattatgggcaacattaccaaaagtgatgatccaaatgtgattaccgatggtattgttccttataaaagtgctcacttagaaggtgctaaatctgagaaagttctaccgggtggacactctattcagttaacaccacaagccgtattagaactacgtcgtattttacgagagcatttagttgaacatggtttgtataaaccataaaaaataaaaagagccaaaggatatcctttggctcttttgttttaggttagattttattgcccagaacggatgatgtaatcaaacgcagagagtgatgctttagcgccttcacctgtagcaataatgatttgcttgtaaggtacagtggtacagtcacccgcagcaaatacaccttttacattggtttcgttgcggtcattgacaatgatctcaccacggttggttaactcaacctcactgtcttttaaaaagtcagtgtttggaagtaaaccaatctgtacaaagatccctgcaagctctaccacatgctcttcatcagttgtacggtctttatatttaagaccggttacttgtgaaccgtcacctaatacttctgtgcttaatgcattcataatcacggtggtgtttggcaagctatttaacttgttttgcaagacttggtcagcacgaagtttagtgtcgaactcaaccagagttacatgctcaacaatacctgcaaggtcaatcgccgcttcaacacctgagttaccaccaccaatcacagcaacacgtttgcctttgaacaatggaccatcacagtgtggacagtacgctacaccacgggtacggtattcagcttcacctggtacattcatttctctccaacgtgcccctgttgaaaggatcacagttttcgattcaagttttgcaccgttttcaagttcaacttcaaccaagccatttgctgtttggtctgcaccagtgattttgctgacacgttgcaggttcataatatccacatcgtattcacgaacatgtgcttccatttcagcagcaaacttaggaccttgggtcttttgcacagaagtgaagttttcaatatccatggtgtccatgacctgaccaccaaagcgttcagccacgatacctgtgttaatgcctttacgtgccgcatagattgcagctgttgcacccgcaggtccaccaccaatcaccaatacatcaaacgcatctttggcattgagtgctgctgcgtctttttcagctgaattggtatcaagttttgccacaatctcttcaagggtcatacgaccttgaccaatgtgttcattgtcctggaagaccatcggtacagccatgattttgcgttgttccacttcgtcttggaagaatgcaccatcaatcatggttgccgtggtgttcgggttataaatggcaatcaggttaagtgcctgtaccacgtccggacagttatgacagctaagcgaaacaaacacatcaaagttagctttgaggtttaagcctttaatctggttaagcacttcatccgacactttaggtgcatagccagacacttgtaacagagccaagatcaaagaggtaaactcatggcccattggtaagcctgcaaagaacacacgaggctgttcacctgctttagccacaccaaagcttggacgacgtgtattattaccgtcaaaacgggctgttaccttgtcagaaagctcagcgatttcagttactaattctttaatttgagcagctttatctgattcatctaaagcagcaactaattcgattggactttctaaacgttctaggtaagcttttaattgagttttaatgttttgatctaacatctgttttttactccaatgcatccaaattctttcaatagatacatagtacgttaaaacaatgaataggtaaaacagtatgtttttatatatttgatcggttttttagattttattatttcttcaatcaaaaaaagccaacctgaactcatcccagcgcaggtcggcaaactggttaaactagagtaagaccacaccaaatacagccccagcaatcaaaacatgcaatggatgaacttttttaattaaagataataaagttgcaatgactaccataatgataagtaaagtatttattgccgctgcttcagaaataatccatgcactggcaagcacagtccccacagtgacaggttgtaaagcaagctgtaaaacacggcgccatttcttatctttgaattttgaccagcctctcatcacaaatacagtaataagagatgacggtaaaaatttagcagtagacgtcaccaatagaccagacaaccctgctacatgccaccctaccaaaggtacaatcatcatatttggaccaggtgcagcttgtgccatggcaaacaacgcactaaattcttgcgccgtcatccaatgatgaatatcgactacttgacgttgcatttcgggcaaaatcgtattcccaccaccaaatgcaataagagacaactgagtaaaaatgattgctaaagtaagtagtacggcacccattacacacgtctccaaatgatggctgaataaaacgcaagtaaaatcagcatagtcaaaagtaaaggaatttttaggagagcaatgctgacaattgccgccactacaacacagattgctaatggattacgtaataagggcttaagcattttcaaacctgtggcaaccagaagccctgctgctgctgctcctaaaccttcaaaaaggtgcttaaccattaagttgtcttggaactgctcatagacataatgtaaaagtacaacaattacggtaggtgcgaagattaaaccaatgagtgagctcactgctccacggacaccgcgaaactccatgccaatcgcaaccgataaattaataatattgccgcccggtaaaaattggcacagaccaagtaactcagtgaatttttcagggcttaaccaatgcctttgctctacaataactttacgggctaaaggcagcacaccaccaaatccaattaaacctaatgttaaaaaacctaaaaataactctgtgcaagtaggaacagtatccttctgcacggcaatctcaacatggttcattttcgttacttttcactttatccgaccaagatagaatgatacttttatgatatatctacaaatgcttttattttcattaaccataccctaaaggtattcctatgctcgatttatataagcttcatgcctttgtagtggtggttgaagaaagaaatattactcatgcagcaaaccgtttgtttattcaacagccacctttaacgcgtttacttaaaaaacttgaacaagaactcggtacacagttacttattcgtcaaccgcgcgggattgaaccgacggaagcgggtttagcattatttaaagaagcacaacttttattagaacatgcccgccatattccccaattggtccaagatgttagccaaggtaaaactggacaactcaatattggctttacaagttccgcaggtttgcatccgctcatttcactcgtattacgttcatatcgggaaatgtaccctgctgtgcaaaccaaacttgaagaagcaggcagtcaaaagcaactggactggttaatttcagaaaaacttgatattgcctttttaagagcgccgattagccgagatattggtttgaagcatcttcatatattaaacgagccaatggtggtggccttacctatcggccatccgcttacacagaagaaaaaaattagtttaagtaacttgtcagaggaaaattttgttttataccgtcgctcttcagggcaaggcttatatgacaatattttatatagctgctatcaggcaggttttagtccgcgtattattcaagaagcgccgcgccctactgcgaccctcaatttagtggctgccggtattggaattagtattgtgcccgcttcaatgcataacttttgggaccatgaaatcgtctatcgcgagtttgatgattcgataaaactaaatgcgcctatttacttaattacacgagaaaatgaaaactcagctaaagtttcaaacttcattgaactcatgcaaaaactattacctacaatgacctaaatgtaaaagctaggcaataaaaaatgcctatataaaggcactttttaaagtcatttttagcaaaaaatagttcaaataaattttacgattttaagagtaatactttttctttaaccaaagcgaaacggtgacgagtgaaattaaaacgggtacttcaaccaatggcccgatcactgtggtaaatgctacaggtgatgctaaaccaaaagttgcaatagctacagctaaagccaactcaaagttattacctgccgcggtaaatgaaatagcagcggtacgcgggtaattattcctcatccgtttactcataaagaaactaataaagaacatcactacaaagtaaatcgtgagtggaatcgcaatacgtaatacatctaaaggtaagctcaccacatcgccaccttttaaactaaacatcgccacaatggtaaaaagtaaagcaattaaactaatcgggctgatctttggtaaaaatttagtttgataccattccaaccctttcgacttgactaaaatcaaacgtgtcaagaaacccattaagaatggaatacctaagtacaccaaaacagcatgtgtgatggtccagaaattgacatcaatcacttgtcctgccacaccaaaatatggcggcaagaaagttaagaacaaccatgcataggtactaaaaaataaaatctgaaaaatactgttaaaggcgactaaagctgcaacatattggttatcaccacaagctaagccattccagaccaataccattgcaatacaacgtgccaagcctatcaaaataaggcccgtcatatactccggatagttatgcaaaaaaacaatcgcaaggataaacattaaaactggagcaataatccagttttgtatcaaagataaagttaaggttttcttatccttaaatacttctggtaaagccgcatattccacttttgccaatggcggatacatcattaaaaccaaaccgattgcgattggaatattaacgttatctacacttaattcatttaaagacacagatgcctgaggaaagaaaactccaatcgctaaacctaaagccattgctataaaaatccatagcgtcaggtttcgatctaaaaaggaaagcccttgtttagtcatgttctactcgaagaaagaattgattaattttgctcaatacacacaaatgacttatgcacttatgctaagaaaatctaaattttaaagacggaaatctaggaagattaatcacaacacgttgtcgtgatgaaagactgatcttgttgttttacttttgtcccactctcgtcattttctatcacctttaaaatatctaaagcccaaacaggtaaatcaggatttaagctgtaataaacccactgtccttttctttcatccagtaatacgccatgagttcgtaacaaagctaagtgtctagaaattttgggttggctcaactcaagctgttcggttagctcacagacacaaatattttgtttatttagaactaatttaagaatatttaaccgagtttggtcagatagacatttaaagaaatcgacttggttgatcatatcttcaacaaaatatattcgttattgcaaatatacggatatccatatataaatgcaatatcttaattcatcgataaatttgtcatgactgagctagtgaagatttaccataaccctgcttgcgggacctcgcgcaatacattggcgcttattcgtcatgcaggaattgaacctatcgttattgaatatttgcaaacaccgccaagtaaagatgaattgattcaactcattaaggattcgaacctaagtgtacgtgaagcaattcgtaaaaatgttgatccctataaagatttagagatagaacaagaccattggaccgatgaacagttaattgattttatggtgcaatatccaattttaattaatcgcccatttgtagttacacaaaaaggtactcgactttgccgcccttctgagattgtactggacattttagattcacaaaacttaggctattttgcaaaagaagatggtgaaatcattattgatgagcaaggccgtcgtataaagtaattgaagatacttattaatataaaaagctaaatggcatggcaccgtttagcttttttgaatgaaacggattaaaaataggatttgataaaaggaagcagttgctctcctattaccatgcctaataaaccgactaatgcaacaagaggtggagctggtgacttaacatttaaaacataatataagacaccaacaagcaaccctacagccaaagataacaagtacattttcatcgtacataccttaaggaaacaagctatttaatgaggcaggttcccatactgttttatttaaaatgcaaaacacgagcacccaagtgcgccccagaaagattttttgtccttatcatttacaggaacatcaagcatccaagcgtggctgtgtccatgcattccacagctactagcacatgcacacaatgcactttgtgactgtaatgattgattcgatggtgcattacggttttcagataagcgccactgaccaccgaagcgttttactggcgaccatgttggagatgctggcggtaacggcggatcgtcttgcttaaactctgcccctgcgtacaccacttttccacctaaaacagtgagtacagactcaatccactggatatcttctgcttcaactttgaagtagtcatcagacaataccaccagatcagcaagttcccctgctgtgagtgaacctttgacatctttttcacctgagaaccaagccgaacctttagtccagagtttgagggccgtttgacgatctaataaatttttttcatcatacagcggtaaaccaccaactgttttacctgtagtcagccaatacaaacacacccaagggttataagatgcaacacgagtcgcatccgttcccgcacccacaggtacaccgagttctaacattttcttgactggtggcgttgcttgagcagcttcggcaccatagcgttttacgaaaatctcaccttgatatgccatacgatgctgaatcgcgataccaccacccaacgcaccaatacgttcgatattacgctcagatacagtttcggcatggtcaataataaatcgtgtcgcaaatggctgttttgaattgacgcgctcaaatacattgagtaaccgactaatactttcatcataggttgcatgaatacggaatggccatttcttttcagccaagtgctctacgatggcttcgagttcaccttccattttttctggtaaatcgggacgtggctcatagaagtcttcaaagtcccccgctgaccaagtcaggttctcgcctgctccattcattctaaatagctcatcaccatcgcccggaaatgtcatttcggtccagcggcgataatcatcaagctcttggcctgccttctgagcaaataggttataagcaattcgaaccgtcatttgattttgatcgtgcaattgcttaatcacatcataatcttcaggatagttttgaccgccaccacctgcatcaattgctgaagtaatacctaatcggttcaattcacgcatgaaatgacgagttgaattgacttgatcttcaactggcaatttcggcgctttacctaaagtcgaatataaaatcatagccgatggcgttgcgagcaacagtcctgttggctcacctttttcatttcgtacaatcttgccacctggcgggtctggcgtgtctttattaaaacctaatacatcaagggcagctcggttcaacatggcactggcgtataaatgtaaaacgaatacaggagtatctggtgcagctttattaatttcttcctctgtacacgataaaaatagataactcattgaaataatgtcataataattgttttctaacgacgaatactatgacacatctcaatgagttatatcttatcttaaacaaatatctaaaatggaacaagtcacatttaaagtgctttgcgctcatcatgcttgtgattattttaaagcaaacatgtaatctttcttctgcatctaaagccttgcccatcaagtgcttaccacaatcattttatcgacgtatgcagcgcttctttgcaggtcagtattttgattatcgtcaaatttctcagttgattttcaatatgttttcattcgaccaagtgcaactgactttagatagaaccaattggaaatggggaaaacgaaatattaatatcctgatgctcgcaatcgtttatcgtggaatagcgatacctatcctttggacattgcttaataaacgtggaaattcagatacgaaagagcgtattgctttgattcaacgctttatagccatttttggtaaagaccgtattgtgaatgtgttcgcagacagagagtttatcggtgagcagtggtttacatggttaattgaacaagacatcaacttctgcattcgtgttaaaaaaacttcattgtcaccaatcatttaggaaagaatcataaaattagtgatttatttcgccatcttaaagttggtcaaattgaatgtcgtaaacgacggattttggttggtcgggtgaaactatatataagtgcactacagttagaaaatggagagcttttactcgtcgtttctcctcagtttaatgccaatgctattcaggattatgcattacgctgggaaattgaaaccttattcagttgtctcaaaggacgcgggtttaatcttgaaaatacgcgcttgacagaccctagacgagtgaaaaaattgattgcggtgttagctataagcttctgttggtgttacttaacgggtgaatggcaacatgatcaaaaaaaagcgataaaaataaagaagcatggacgactctcaatgagtttatttcgctatggtttagactatgttcaaatggcgattcagcgtttaattggttttgggaaaaaagaagagtttaaggaaattttggcaattttaagaaggcagaaccctgataggataagggttctgtgaaatttgtcgtgtacagagaatttcttctaaagtcggtaaacgcttttcagcaaactggaattcagtccaaccgcctactacacgaacccattgtggagctagcgtattatctgcttgctctttgagtaagcgtaacgcatcggcaacggatggcacaccttcccagcgcagttccatattgtaatttagaccaccacgaataatatgcagatgactgtcatttagacccggtataacgcgtcgaccatttaagtctacaactttacttgttggagttgcgagtttcataacctcatcagttgtacccgtgcggacgactttaccatctgcaatcgctattgcttgtacttcggggttctgaggatctagtgttgtgattttaccgtttttaagtatgaggtttatgtcggtcattctgaactccattcttgtgaattatcgttctaaagaaataaaggtatatctgtattaatatcacttaaatattgaatactagacatacctttacctaaatcagtactgttttattttgcaggaattggtgcaagtacttcatgttttgatgttgtacgctcaggcgccttatgtaccatcgtataggcatagtccacacccataccgtaagcaccagaatgctcacgtacaatcgccataactgcatcgtatgtatcacggtgtgcccagtcacgctgccattcgagtaatacttgttgccaagttaccggaacaacacctgcctgaatcatgcgttgcatggcgtagtcatgtgcttctttcgatgtaccgcctgaagcatctgcgaccatataaatctcataatcgccttcaagcatggcgccaaaagcaaaggtgttattgcacacttcagtccacaaacctgaaacaatcacttttttacgattatttcttgcaagcgaatcacgtactttttgatcatcccatgaattcattgaagtacgttctagtaaaggagcatctggaaatacatctaaaagttctgggtaggtatgaccagagaagctttcagtttcaactgtcgtaatcgtgacaggaatattgaatgttttagctgcttttgctaaccctacagtattattctttaatacttggcgatctattgactgtaccccaaaagccatttgcggctggtgatcaataaaaataacctgacaattggttggtgatagttgttctaaaagtgatttattcacgtctaaactccattattcattatataaggcttttaaaattgcctactggttattatcaaaacaaataaaaatgtaaaaacatagacagcaaaacagctcgaatctgtatcctgtatggatacaatcaaatcaatgattgctttttaatttttatagtttaatcatggatatatattttttaatttttagttatccatggatcgattagactgtatttccacttttgtaagtgtcgtagaacatgggaattttagtagcgcagctagagcactcgatatttctcgtgatttggtagccaaacgtgtttgctacctcgaaaatgatttaaaaacaacgctattaaatcgaacaaccagacaaatgaatctgaccagttgtggggaaaaattttaccaacattgcaaggttatattgagtgaatttgaatgggcaacttacgagattagctataaccagcaatatcctgaaggcgaactcaagctcaatacgcccatgtcttttagcaacattttccttcaacatatcatttcagactttattgagaaatatcccagtattaaaattgatttgtttatgacagatcagctattagatgtgaatcaacacaaatttgatctgaccatacgcttagatggatctgcgccaagtttggcaaatagtaaaattttaaatacctatcaacgttatttatatgcaacacctgaatatttcaatcaacatggattacctaattctttagaagaacttaaagaacataagtttctaatttactatcaagatagccgacataaaaaattgatttttcaaaaagatcagaaagaagtgtcttttaattgtttccctgtgatgacgtgtaataatggtgaactattattggatatgtgtttgaaagatcacggtattgtttttcttccagagtttattgcagaaccttattacaaagaaggtaagttgcagaaatgtttggaagactacaccagtcagccacttcacttatatgtcacatggccaaaccgtaagattttatcgaaaaaagtaaaactatttattgattttttaacacatcaaatcattcccataaaataaccaatctgggccttttccataggaattggcccacgatttttaattagtttgaggtgtttcaattttcttatttttaaataaatttaataaattttgctctgcagatactgtactgttttcttcaataaatgtggttgcgtagtgttctaaatgttcttccatcaattgagtagctcgtttttcatcaccttgttcaatggcatctaaaatcgcacggtgttcatctgccgaacaattattatgttttggaatttcatataagccaattaataatgaagtccttgcaataagcgtctgcaaataactggtcatgatcgaattttgattagcttcaatcagctttaaatgaaattgacctgatagcttaatccactctgcccaatttccagctaaacgctcatgagactcttgatctactaagcttcgaagctcactcaaatctaggcgatgagatttttgtgctagtttttttacagtggcgatttccagcatgctgcgtgcttcaaagacttcttttgtttcatttgtgctatgttttgcgatgagtgccccacgattgggctgaatttcaataaccttatcatgtgcaagtttgacgaaaacacgtcttaacactcctcgcgttacaccaaatgcttcacataaaggtgcttcaactaaacgtgcgccaggggcaagttgcctatttaaaatagcatctacaatagcgttatatatatggtcatcaatttcatcattgctcatttctacggctttttttggtgcattcgatgacattgatttctccatttttattaatgtctcctctttttaggacttcatctattttgaatagtgtaagtttaacttaagcgtttggaaatatttctctcattttcacactatctatgctgagctgaataattcaatattaaatctctaaatatccacttatatacctaaatttatttgctttttataaaaaattaagcacgtctcagtttataaatctctctcttcatattccaaaatcgtatcaagcgaaatcactcatcaatactacatctcaagtttggcataacttttgctcaataaattgtgcacaatccaaatattacattgtgcacaattttactttcattcttttagtcagtatttcaagctgctgaagaacgtgcccgcccaacatagggaagtgagtgttcaagatgaataataccgaagcaataattaaatcttcttatgatgcaaaactgacaaatcaagacttagctcctttaaaaaagcaaacttggggcgcttataatatttttgccttctggatgtcggatgttcatagcgtcggcggttatgtcatggctggaagcctttttgcactcgggctcaatagctggcaggtacttctatctttactcatcggcattgcaattgttcagttttttacaaatctaattgccaagtctagccaacaaacaggcacgccctatcctgtgatttgccgcgcaaccttcggtgtgcttggtgcaaatattcctgccgttatccgtggtcttattgctgtcgcatggtatggcattcaaacctatttggcctcaagtgcattcttattggtcattttaaagttctttccagactggtcagcctatgctgatgtttcaacttacggctttcttgggctttcctatttaggatgggttggcttcatgctgctttggttactacaagcgattgttttttggtctggtatggacagcattcgtaagtttattgactgggcaggcccagctgtctatgttgtgatgtttgcgatggcagtatggctcatctggaaagctggctggcagaatattgatttaaatttaagtggggttcaatacgacggttttgcagttgtaccagtcatgattggtgctattgcgcttgttgtctcatatttttcagggccgatgctgaactttggtgacttctctcgttatggtaaaagctttaacgcgattaaaatggggaactttcttggcttaccaattaacttcttaggcttttctttacttactgtggtgtgtattgcggcaacgcttccagtatatggaaaacttattacagaccctgtcgagatggtcggtaaacttgataatacttttgtggtgattttaggtagtttgaccttaatgattgccactatcggaattaatattgttgctaactttgtttcacctgcatttgatttttccaacgtttcaccgagcaaaattagctggcgtatgggtggaatgattgcagcagtaggttcaattttcattaccccatggaatttgtttaataaccctcaagtgatccattacaccattgatattttaggtgcatttatcggtccactttttggtgtattgctcgccgatttttacctcgttaaaaaacaaaaaatcgtggtagatgatttatatactttagatactcaaggctcgtattggtacaaaaatggttataaccactctgccttttatgcgttaattccagcttcattaattcctattctctgcgtacttttaccacaactgtctgggctggctaatttcacatggtttattgggatgggattcggttttgtcatttaccgatttcttaaccaaccgcttgcccatgctaaatcggcaatgactaaggtaaaagtacaatgaaaattaaaattattaatcctaataccacccaaagcatgactgacaaaattgctgcatcagcaaagatagtcgcaaattctgatactcaaattattgctgtaagtcctcaaatgggccctgcaacaattgaaagttattatgatgaagccctaagtgccgtaggtgtgctagaggaaattcgccaaggtgaacttctagatgtagatgcttatgttattgcctgttttggtgatcctgcgctttatgccgcccgtgaaatcagttcggcacctgtgattgggattgccgaagcagctatgcgaactgcaagttatgtaagtactggttttagtgtagtcacgacattacaacgcacagtgaatatgagctggcatctggctcatcgctacggggctacgccattttgcaaaaatgttcgagcttgtgacattgcagttgaagagttggagcttcctgactcagatgcttatcgaaccatacgagatgagtgcaaaaaagccctagcggaagacaaaagcgatgcaattgttttgggctgtgcaggtatgagcgatttatgcataaagctacaaaacgagttgggcgtaattgtgatagacggcgttgcagcagcagttaaacaagctgaaatgttagttcagttaaatttaaaaaccagcaaagttggtgattgggcctcacctcctgtaaaaaattacacaggcatattgtcaggatttggaatgagctaaacagttactgtttcaattccaactcaaaacgctgcgttggaattgaaacaaagaataattaaagaaattaagcctctgctaactctggctgttgttcttctttataaaatggcacatcaccgttaatagttgcacggtgcataattcgatgagcatctccgtaatcaaataatgctttatgttgtgtgcaacggttatcccaaatcgcgacgtcaccgtcttgccatttccagcgtaaatgaaattgctcttgggtcgcatgttcaaacaagaaattaagtaattgctcactttcttgttcgggtaactcattaatgcgagtggtaaagccctcacttacaaacaacaaaggctcgcctgtaaccggatgagtacgcaccactggatgaaccactggtgggttacgcttaaaggtttgcaaaagcttttcacgttcttcttcgttatgggcaaaacgctcaagcggaaaagacttacgaatatcgtgggttgcagttaagccacgtagttttcgctgtaactcaagcggaagtcctttaaaagctgctgtgttgctcgaccacaacgtgtcaccacctacaggtggaattttaatagcttgcaacacacaacctaaaggtggagttttactaaaagtcacatctgtgtgccaaagttcattgtcacgcaaatcttgtttccaactgtcgagcaccatcacctcaggtacatcttcaattgaaggataaatcgggtgcacatgcaatgtaccaaaactacgtgccaagtctgcttgtgcttgtggtgctaattgttgctttcgaaaaaaaatgacctgatgatcaagcaaagcctgctggatttgttgcgttgtctgttcatttaacgcattcaaatcaatattgtgaataattgcgccaatggtaggcttgatcacttctatatttaagtttgctactactgtattcatcttctttactacaactgctgaccataccaaggagaaaactgtttttgtaaccaacgtaaaaacagctcaaaactaactgcgacaatcgcaatcacaataatgcccagaatcaccgtatcggtaattaagaactgtgctgctgattgcaccataaaaccaataccacggtccgctgcaaccaactcagctgcaactaatgttgaccagcccaccccaagaccaatacgaataccggtaataatatgaggcaaagccgttggtaaaatgacatgccaaaagacttgtgactggcttgcccctaatgacaatgccgcacgttcacgattaagctgatggcttaacacaccatgcgcactactaataatgactggcgccaaaatcgagaagaaaatcaaaagtacttttgtggtttcaccaataccgaaccaaataacaagtaatggcaaataagctaacggtggaattggacgtaataattcaaccaaaggatctagaacagcacgaacccatttgttcagccccatccacaaacccagcggaacaccaatcaccacggcagcaatcaaagctaaaaatacacgagaaatgctggctgccaaatgttgccacaaagttgctttcataaagccttcttggctgaccgatataaatttttgccagactgcctgtggactcggtaaaaacagttcaggtacaacatgcaaagcagtaatgaggaaccagagtgcaactacacttcccacactgattatgctgaccaccaaagtacgatgcttctcaaaaaatgatgatagaaatgaagcattttctgtttgcacatttaactcaggtttaagctctgctttgtcatattcatagacgttatctttagtgttcatgtaggtaacgcctccttaccgctttgtttttgtgcccttaaactttcaaatagctgttctctgagctgaataaattgagaatccgatttaattgagcgaatagactcaccctgacggtaccgttgggcaaaatcgaggtgtagagtttctacaattttgcctggatgcgccgtcatcagaactaactgattgctgagcaataatgcttcttcaatgtcatgagtaatcaaaaagaagcttttattttgttgaatccataaatcgagcactaactgctgcatgttttcacgcgtaaaagcatctaatgcggcaaaaggttcatctaataaaataaacggcgcgtgactgatcaaagctctggcaataccaacacgttgtttcataccaccggaaagttcccagatattcgctttttcaacgtgacttaaacccacaatttttaaaattgcgttcacttgtgcttcgatatccgcgcgctttaaaccttttaactgcaaagcgaagccaacattatctgcaacattcaaccaaggaagtaaggcgtgatcttgaaatacaacagcacgagttacatctggtccagttacgacttcatgatttacaagcacatcacctgaactcggcttttgaaaccctgccaagatattaagcaaagttgttttgccacaacccgactcacctaaaatcacggttaaagaaccttcttcaatggttaggttaatgtcttgtaaaactggcttttgctgtttaggaaaagtcagatgaatatgtttggcttctagtacactcatgacaactccttaaggctgcaaaaatgaagaattcacattgcctttataatcggctttaagttgatcgactttgccctgaccttttaagaatttcgctgtatcaaaaatattttgcgcaaattcaccatctaatgtttgtttttgctgagcgtggtcaaggtaaatatttccacttaataaaagcgggatatcttttgcatcagaacctgtgagctgcgcaattttttgcacgttatcagcatctttaacgtaagcggctgggtcttggttatatttttcgagttgctcaagtgtggtttggacaaaagctttcaaaaagtcaggatttttctctgcaaagtctttacgtacaacccataagtcataagttggagcaccccattcaccgacttgttttgagtcggttaaaaccgtaccagatgctttggctttacttaaagcaggttcccacacataggcagcatcaatatcaccacgttcccaagcagctgaaatttcaggtggacgcaagttaataatttttactttgtcttctggaatgttccaatgtttaagtgcagacaaaaggctgtaatgggttgtcgaaacaaacggtacagcaatggttttgccaattaaatcttgaggagttttaatgcctgatttattactcaccacgagtgcttcagatgcaccaagttttgaagtaattaagaatacttcaatcggtaaattacggcttgccgcggcagcaagtgggcttgaaccaatattaccaagtaccacatcacctgaagccagagcattgacaacatctgaacccgcatcaaattttttccattgaatagtacgttgactatgtttttcatagtctccattggcctgcgccactttgcttgggtcaaccccagtttgataagcaatcacgacaggcttattgtcacgaactgaagcacttgtattattgtcttttttattttgccatacgataaatgcaacaattgcgactactacaattgccgtgatgatcaacggtttggtcttcgtgctcataatttcatgatctttcaataatataagctcatagtatgcagctggccttataatgaaaaataaaaaaatatgagttgcttatctggtttttataaataacttttcttcataagtttttatcttttggtaaaaagcaaatttcaagcaaacttacagattagcggtaaaattaaattacttatatatcaataattaaaaacgatattcccaaatcatatgattagaaggccctgacatcccccttttaattattttatcctactcatatttcatcatttttatttttgtctctatacccagagttttgcatctaattaattttcgagattttttataacggtcagattttattatctttttatcttaaaacttctgcaaatattgagatttggacaaatctttttctggtttatacatgacgcaaatttactttttatttttaagaggagaaaaattcttttgtttaagcattctcaaattttgacaaaaacattaattacaacgtctttgcttacattcagcctctcaagtcatgcagcccttacctttggcaatgctgaagaaggtcaacttaaagtaagcggtactgttcgagccaaatatgtttatgatttcgactctgaaccgtctaccagtaaattttcctttaatgacgcggtcttatggctggactacaactccccaaaatggattggccgcctagattatcgggtttatgaatattatggacgtttaggcgatgccaattggctcaccgatgcgtggttgggttataaaattaatgacaacagtaaaattattgctggcttaaaccccgttccttttggcttgggtcgcttttggggaaatacttattatttaggcattgccaatagtgccggttaggaagatgtacacaaccttggggtgaaatatgatttcaatgatggaaccaatgaagcacaactcgccttttatcctaccgatggtggcacctatagaggtaaaagcaaagactcgagtcgatttagtatcaaccctgtcaatgcagatgactctgtaccgcaaggcaccaataccaaagaaaagaactcaattgttgttcgcggtgctcatacctttaaaaatgtcctaggccaagaaaatttctctactcaacttggcgcctccgcatggtattccaccattgaaaataagcgttcagggcaagatggcgatcgccaagtttattcggtttttagcaataccaattacaaccaatggaatttacagcttttggctggttatcaagacattgataatgccgacacccaatataaagatcatctgactttgggcggtttcgattattcatttaactcagcaaccaaaggtcagatttattcagcagaactgagctatttatttcctcagcagtttggcccaattacctctgttcgtccgtacttgaactatagttcttatcgaaaagagcaagatggctttaaaaactccacccgttttattcccggcattgcgtttaactatcaaaaattgacagtacaagcggagttgctgatgggtaaacacgatccatatctaggagacagtgaaggccttgcggctggcggaagcaatgataaatggaataaaaaagcgtttgtaatttttgcttattacttctaattcttaaaacaaaggccaacagatgttggcctttatctttatctagatatttatttttactctagtcgattactggtgaattattgagaggaagttctgttttatcttcatcaaccacatcgacatcttgggcggtaggctcaaacttaatcagtagtccaatcacaattaaaggaataaaggcaaagatagaaataatcaggtaaacatcggttttataccccgccatccagatcggtaaaacaaacaaagcaatggcttgagcaacacctgttaccgcacggttaaagccgactccaacgccacgaatcgaagctggataagccatagtaggataaaccatcatttgtgccccaggcccaaagccttccgcaaaaagccaaagcccgagcatgccaattgcggtatagagtaaaaagctattacccggctcaccaatgaatgccaaagcaatcagggcaataaactgaagtaaaaaacctgtaagcaacacatgacgagatttaaatctgctagcaacaaatacgcctaacaggccgcccgtaaatgcaaacagtaaattgagtccgagtgtggtagtaatggtcgtcaagacatcggtatgaaagaaacgcgttaaaatagaaggtaaaaagaaagcaatggtcgtgtactgaaatgccaccgaaatgtgaatcacaattgccacaatcgttcttggcaaataggttttattaaataaaactgcaaaaccctcgcgctttttcttttcagcagttctttttactttttcaactgtagcgactgcatgaattgcataggattcttgtagaacttgagcggctccttttaaatcgccttggtttgcaagccagattggtgactcagttaaatatttaccgcgaataaaaataatgagtaacgctggcactgctccgaaaattaaagatgctcgccataaccagttgctatgctctggtggtaaaagaaaataaagcgccaaaactaggccaaaacacaccgaagaagcggcataccacattgggcaccatgcggctagacgcgctgccttattgctactaccattaaatttggaaaactcagataagtatgacattgcaacgggtaaatcaataccaacactaattcccataatgaatcttgctaaaatcaaaacccaaacatttggtgcaaagcccgcgacaattgcagcaataacaaacagcaccatgtccgccatgaagacccgataacggccgattttatctgtcagccaaccaccaatcaggttacccacaatggttccgcagacaattgctgaagccaccacaccagtcatgacagggcttaaagaaaactctgagatgacttgctcaataccgaaagagagcgttgttagatcataggcatcaataaatactccaatcagtgccaaccaaataactttattcgatttacccttccctgcaaatttggaaattaattgtgaaacatcatcgggagatttaatttcataacggtggttatgatcgagttcttgtgtgctcacttaataattcctgtattttaatcacagaaacaaaataatgattattcacaccatacaaaaacaaattaatctgatgttttaatctaaattatagaattatcttttcattattaactcagcaataaaatcgatataaaaagacaaaataaaagctggcatttaaccagctatttatttaaagactttccaaaatatttaactcgcctcagcaagttttaactcttttagattacgatattttgcacctcggtgattttcaggcaaatatggcccagcaccaaatagtttttctcttaatgttccttgtgcatatgaggtttgatataccccacgtttttgcaactctggcacaataaactcaactacatcggcaaaggtttgatgcgccaaaatgtaggctaagttaaaaccatcgacatcggtatcttcaacccattgctgtagagcatccgaaacggtttctgccgaacctacaagaacaggtccattaccacctaaactattccaatttgcaatttcttcaatggtccaaacacgttctgggtccgcatttacataagaatctaataaagattgaatcgcgttagtttgaatatattcaactttgtccgttggctggtattgtgaaaaatcaacaccagaccagccagaaagcaatgttaaagcgccatcatagcttccatagctttgatattctttaaacttagcctgtgcttttgcatcggtttcatcagtgacaatcgacaaaagtgcataaattttaactgagtacgggtcgcggccttcttggaccaatttttggcgaatgccttgtaccacttttttagtggcaattttagacggcgctgcgatgaatacacactcagcattttgactggcaaacttctgcccgcgtgaagatgcgcctgcttggtaaagtactggtgttcgctgcggtgatggctcacaaatatggatgcccggtacagtaaagtatttaccttcatgctgaattggatgcacttttttatggtcagcaaagataccgctttcacggtcacgaagtaccgaaccttcttcccaagagccttcccaaagcttgtaaaggacttctaagtattcatcagcaatatcataacgattgtcatggttaacctgagtttttaggcccaagtttttcgaaccgctttccaaataagacgtcacgatattccaaccaactcgccctttggttaaatggtctagcgtgctaatacgtctagcaaaaggataaggatgttcaaaggaaatagaagtcgtgacaccaaaacccaagtgctttgtgacggctgccatcgctggcacaatctgtagcggatcattgactggaacttgtactgcacctgttaaagcatgttcagcactttgatgataaacgtcataaataccaagcacatctgcaataaaaataccgtcaaaaaaaccacgctcaagaatttgcgctaaatctgtccaatattctaaatctttatattcaacagatcggtcttgaggatgtcgccataatccaggagattgatgggctatacaattcatttcaaaagcgttaaaactaattctcttagtcataaaatatcaaccagtattttatttaatttttatactaaagcaatttttatattttctttataatatataccccaaacaaaatatgattttattctaatagttttttataatttattttaaaaaatataaataacattaagccgctaaaaatagcagcttaatatctaaaactataatttattgtttagcaacttcaccaattcgccattgataaggtggtaatgttccgttcacactaaaatcacctacaattcgatttttaaatactcttgggttatgtgaagataaagttcttacattacgccaatatcgatctagacctaaatctttgtctgttgcagaagcacctaaagcgtcaaataaaatcgtggaagcatttaaaattagatcggtaatgaccgtttgagactgcgcactttcaagctcggcaagtgcattttgttcttcttcaagctgctcattattttgaaatgcagccaagtaagcacgctgtaagctttgtgcaactttttcaacaatcgctcctgcactataagccgcgccacgaatttgtcctactacttgtaaaatttgcggatcctgttttacaaattgggcatttgcatgcgtgtagtttcgggtacgtttcgcaacagcttgagaaacatcataggttgcagcacgccctagacctgtaatgattgccagttggaccagttgatagtaagccgccgaatatttaaaacggtcatcgtcaggtaaaatttcagcttcatcgaccaatacatcgtggaaatatgccgtaccacttgcagtaagctgctgaccaaaaccattccagtcatcgacaatttcaacgccttcatcttcacggcgaacaacaactgagccagactctccttttaaatctgttaccccaacatccacccagtctgcatataggctccctgtggtgtagtattttttgcctttaacgcgaatttttccgtcactatctcgatataagtgcgtttcgaattgatcaattgactctttcccgccttcagaccatgcactacccactgtttcgccatttgcaattcggctaatccaacgctgctggaatgccttatctttacttaccaagacatcttcagtaaaaccaaaatgcacacgcaaagcttgcggtaagtttgagtcggcctctgcaagttcaatgagcaatgcaaatagttcaggaatagttgcatcaaaaccaccatgagctttaggaagtcgtaaccgtgtaaaaccaatatctttgagccactgaagttgctcatacggcaaaatatgctgctgctcacggattaaagccccttctttaatacgggcaaaagtcggtctgaagttacttgccaattcatcataccgttcagaaggtccttcaccccatacccgcgaaatgattgaaacctgactcagtgcagcgtgagttaatgaaccgagatgatgctcaaaatttaaatttgtcatgtaagtaaaaccaatattgctttgcttttaccataaaatatttatttcacatgaaaacgattatttttttataacagtattcaatcttgatataacaccaatcaaaagcatggcattgctaagcaatttgttttttgtgaagactatgctgactttgcaataaggtttgcatatattctgaatagacagaaagtttttcgaaaatatgctctgagtaaaacatgtcatcaattaagtgtgtcatttgactggcagtaaaggtatcgcataggcagactagtgctgcattcatttgagcaaacagaacgcataattgaacatgcgtttcatctttatttttaaataataatttacgcatatccaactgatccaagtcttttagaccctcatcttttacgacttttacccaatgaatttttatttttaagaactgttcaagttgctttaacgtctctaaatcaagctctaaatgggtgattaaaaaaactgtagagatatcacttcgacataatgctttaattaaatttaaataaataaattcagcttctcccatctctattaattctaaatctagatatatttttaggctttctaaaacttcgtctaccttaaatacggccttcttgtcagcttgatagtatttattaaggatagttagcacaagtggagtcgccggtgttgtataaatggctgctttgtttaagttcgcaaaaataaatggcgagaatagataagccaaactgctttgctgtggctcaatgtgagactgaattaaataaacggtttgagttttagaaaaatccctgagtactttcgctctaagtaaggttgcttcaaggttcacataagtctgttccaactgatctattaccaaggtggaaatagactgatttttaataattttatgaataatgttcagttgagaagtgataaacattttttaacatccaagctattttagaagcgttacacttacacttaggtctttaagaaacacgcaacaaccagaccctacacaaaacaacaatggaatagaaaagaagaacactatcatgtacttatataaaatctaaaacagcgttcacattatgtcttgaaagttgatttaggttggcggtaaatcctgttcatttttattttgaactttagaggactggatatatagctacagatgattgaaaaaaaactatagcacgctatcaaaacacggtttaactgttatagttttataaaaaatttctgtatctacatatacaaatacagtgagtgcatgattaagaaaacttcttaaggtaggtagttttcatgagacgatctattgcatatcgccagatatttcatcaatgtttcaatgcaacatgtatttttacaaatgcaacatcaagcctaaactttgttaacagattgagaacaatcaatcgttctattctcttgaaatatcaagcaattatgttgctttaccctgttggcactttacttgctaagaacatttatcacagaagtaagcctaattgccaaagtacttttttgcctgaaattaagtatttaaatcatttaatcatcatcagctagttcacagggggaaagtttatgagcctcggtctaaccgctttagaattagcacgaatacaatttgcttttacagtatccttccatattatttttccggccacttctattggacttgcctgttttttggcagttttggaatggaaatggttaagaacgcaaaaccctatctataaagatctatttaaatactggattaagatctttgccgttgcgtttggtatgggagttgtttccggtgtcgtgatgagttaccagtttggtaccaactggagtgagttttcacgagtagcaggaagcattactggtcctttacttacctatgaagtcttgagtgccttcttcttagaagcgggtttcttaggaatcatgctgtttggttggggccgtgttggtcctagagcccatttctttgcaacgcttatggttgccatcggaacatgtatttccatgttctggattctatcttccaatagctggatgcaaacgccgcaaggttttgccatcgaaaatggcattattgtgccaaaagactggctagctattgtcttcaacccgtccttcccttaccgctttgcacatatgggtgctgctgccttcttggtttcatctttattggtagtgggaacatctgcatggcacttggtaaagggccgtcgtgatgaattggtgaaaaaatcattctcgatgggtctttggatggtgcttgtgacttcttgtttacaagtggtgattggcgataaccacggtttaaatactcgtgagcatcaacctgccaaacttgctgctatggaaggccactgggaaaccaatcataacgagcctatgccactactgttatttgccattccggatatgaaagaagaacgaaatcactttgaagtgggcgttccatatttgggtagcttaattttgactcacagtttagatgggcaagtgactggcttaaaagaattcgcacctgaagaccgtccaaactcgaccattattttctggagtttccgtgtcatggtgggtcttggcgtccttatggtcaccttatcactcattgctctttggttacgtaaaagaggaaaactctatgaaacatcatggtttcataaatttgctgtagtgatggggcctgcaggttatgtggcaatgctggctgggtggattactaccgaagtaggccgtcaaccttgggtggtatatggcattatgcgaaccaaagatggtttatcgcatactgtttcggcagatcaggtgggtctaagtctctttatttttgtggtggtgtataccatcgtttttggtagtggaatttactacaccttaaaactcattaataaaggccctgtatttatcgacacgccaaatatggaagcaggcggcgtaggacactttaaaacaccgatgcgtccacttagtgcagttgatgaaaatattgacagcaaacaaaactctggggagaaccgtcatgattgatctttctttaatatgggtcggtattatcggtttaggtgttttaatttacgtggtcatggatggctttgacttaggaatcgggattatgttcccattcattaagaatagccaagaacgtgacgtgatgatgaataccgtcgctcctgtctgggatggtaatgaaacctggatggtacttgggggtgctggtctgtatgcagccttcccgctggtctattcaacggttttatctgcgctctacttgcctattattttcatggtgattgccttgattttccgtggggttgcttttgaattccgttttaaagctcatcggaccaaacatctttgggacttagcttttatttggggttcggttttaacgagcttcctccaagggattattttaggggcctatattcaagggattaaaaccgaaaacggtatttttgccggtggtccttttgactggcttactgcattctccattttcacaggtattggtgtagttgccatgtatgccactttaggctgtggttggctcattttaaaaactgaaaaaggcttgcagcaacgtatgtatgagcttatgccaaagctgattatcgcactgctcattatctttggtgccgtcagcttatatacgccgttaacacaccccgaaattgcagatcgttggttctctttaccaaatctgttctattttagtccagtgcctattttggtcttattgtttgttggcctgattttatcggcatgtaaaaaacagcaagaccacaaaccatttatatataccttggcgttagtcttccttgcctttactggttttgtgattagtttgtggccaaatatcattccaccatcagttacgatttggcaagcggcagcgcctcattctagtcaaatgtttgctttagtgggtgcgcttattttgattccaatcattattacttacaccattgtgtcttactgggtattccgtgacaaagttcgtgtaggtgatgaaggttatcattaaggtacgggggtgttatgaaaaagtcgtcagttaaactcagtcaaacccaatggtttattctgttatggcttggtggttttttagccttagctgtgattgcgggtttgtttaaagtgatattgatttatgctgccccttacttaaagtaaaaccatccttataaacaaatgccgtttgtagattctgcaagcggcatttattattggttcagtgcatcttttattttgttatttcgtgcagcccatacatgtataaatcagaacaactcgcccatagcattcgccaacttattgaaagcggcactctaaatgcacatgagaaattaccttcattaagagatcaggtccaacgttctggttttagtttaatgactgtgatgaatgcttatcaggagcttgaatcacaaggtctgatctattcaaaggaaaagtctggctattttgttgccgagcaaattgcactaaagccactggaacaatattcgatcgtttcacttaattctaaaattgaaattaattctttagtttttaaatatcttaaatcgattcaacatgagtctgttgtgccttttggttcagcttttcctgatagtcaacttttagctgcttccaaacttattcaaattatggggcaacttgcacggcaaaggcaaagctatgaccagacagcaagcctacctcccggtaatttagcgttaagaaaactaattgctcagcgctactgtatgcaaggcatacagaccgatccagatgacattgtcattacatctggaggattagatgcactcaatctttctttacaagcagtagccaaaccgggtgactatattctattgcaacaaaccgtgttttacggtgcttggcaggctgctgaacgtttagggcttaaggtcattaccattcccgaacatccacaacatggttttgacctagaggcttttgagcaggttattcatacatatccaattaaagtatgttggctcatgttaaatagccataatccgattgggtttacggtcagtgatgagattaaatataaaattgccaaactgcttcatgaacaccaaatttacttaattgaagatgatgtctatgaagagctttattatggcgggcaaaaaccactttcgatgaagtactttgaccaacaaaatctggtactgcactgctcttcattttctaaaactttaggggcaggttttcgggtaggttgggtctatgcgggtaaattttcggaccatatccaacacttgcagctcatgagtactatttcagtgaatgcactcatccaaaatgccttggttgagttcttgtctcatcatcattatgaaaagcatttgcgcacacttagactttcacttgaacgttataaaaagcagttttaccactatttgaagcaacatctgcccgcgatctgcgagatttattattacccaagcggttattttctatgggttaaattgcctcataaactcgatagcatgcaaatttatgaagaactcatccaacaagatattggtgttgcgccaagcccactctttagtgtcttacccgcacagcaacattatttaagaatcaattgttcttttgagtggaacgaaaaaattcaagctgctttagatcaagtcatcaaaactattcaacaaagggtcgaagcaagcctgtaaagtgatgcttcgacctaagcacaattttaaagtatttaatttatgatagtttcatcttaaagcgcgattttaagggtaagaatatctggatgttaatatggaaatagatgaagaactgactcttaaaaaaatacagatttttttggcctttatgcgctgtggcaacttgtctaaaaccgcggcagaaatgcaactgagtaatgtcagtgttcataaagcactacactctttagaaagcgctttacgttgtcctctttttaaaaatgaaggccgtaacctcattcctttaaaaagtgcttatgtatttgaagaacgggcgcaaaaaatcgtacaagacatttttatcaccgtaaataaaaccagagaagccgctggctttgcagccaaggttttacatttagggtctctttattctttgacggtaaatacaattccaaatgtgattagcggtctcaaactcagacgtagtgagcttgatattcaactgttgctgagttcaaatcaggatttagtgaaaaagctcaaagcaactgagctggatgcaatcattgtagctttaaatgaaaccactcaagatgatgactttgaaattttgccgatgttttcagacgatatctttctggcagtcaataaagattcaaaatatgctgagtttaaagatattgatttaagccttttaaaagaagaaacttttttaactttaaccaagggttttgcaactcataacgacagcgacatcatttttaaaaaagccggtttttcacctaaagttgctttgcaggtcaatgatatttttaccttaattagtatggttagctcaggtgtaggtttcgcactattacctggccgtatttctgcggtttatgaaagttcggtaaaacttattcctctaaaacagcaataccacatgcaacaagaaattggtctggtctttttaaaaagtaaagaacgcgacccaaacttacttgctctgattgctgaatgtcgtatgtttgcatctaactttaaaagatagaagctgctgcgaataacaacagctcttttgcctgattataaaatacgtattaacccaccaaagctttaaccgcaaagaacagaatagttggacccattaaacagccaaggcccgtgtgaaaagttgctgtaagtgcaccgtaaggcactaaacggcggtctgtagcagctaaaccagctgacacaccacttaccgttcctgccaaaccaccaaaaatcatcgcagaacgtggattgtctaatcccataaatttcgcagtgagtggtgttgagaccattacacagattgctttcaccaagcccgttgcaattgataacgccatgacctcagagctcgcaccaatggccgcacccgtaacaggcccaacaatgtaagtcactgcacctgcgccaattgtggtaatacttacagcatcgcgatagccaaaaatccacgcaaacatacaaccgacaataaatggcaaaatggtcccaagaaataaagagaaggcaccaataaatccagcttttttggcctcagtcgcttgtacttcaaatgctgtggctacaatagtaaagtcacgaagcattgcaccgcccatgagtcctacacctgtaaaaagtgcaaggtcggtcaagcctttttcaccacctgtcatttttccgccaaaccatgccaaaatcaaaccaattacaatcgcaattgctgaagcatgcacacgtccattggttaaatatttagagagcttggtcgacaaccacataattaaggcaattaaagcaaaagctgtaattaaacctaaatgtgttaagtcttttaataataattcaaccatgaactttacctccgattcggtttaaggctgtgtcctcttcttctttaggtaaagggctggctttgttatatcgacttagaccagcaatagtgagcgtacaaactgcaactgagactacagccgcaaagagtgccatatggccactcgataatgctgccactacattttgttgggctgccatagcaacaacaaccgggatatacatggtgccccagaatgaaactcctttttcagtttcaactgtcatcattccacgtttttccatccataaccgtatacaaatgagtaaaatcatggcgatacccacgccaccaacattggactttacacccaataaaacgcctaatagatcaccagcaattacaccaaccaaggtgcaaagtgcgagtaaaccaactccatatataatcatgacaatccctcatatccttggatcatttatgcttttgtaaaatctgactcaaaaagaaaaactatttgcctgttctttttgcattgccaattgaatgctgtctaaacgtgttccctgaaatgacaatactgttccttctttaaatgttcgacgtgcaagtgtagtaagcaccgttcccggcaaagcttcgatctgtaacctcacacctcgctcccatgcagcttggatggtactttcccaatctacagttcgactcatattaaaagccaagtcatcaccaatctgttctggcctgctaagcgtacgagccgttgtaccacttaaataacgtattttaggctgctttaaagtcattccctccatagacgctgcaagttgctttgcttgctgacttaataattcacagtgcgatggcaccgatacatctaatttttttgccaccacgccttgttgctttgctaaaacagcaacttggttcatggcttcaaaacttcctgaaataacgatctggttatgtgcattaatatttgcgacaaacacctctggctttatttcataaatctgtttgacccatgtttcaacagttgcacggtctgtaccaatcagagctgtcatgccatatccagtggggtaagcgttttgcatgagttcacctctgtaggcaaccaaacgaacggcatcctcaaaggctaaaactcccgctacaaccgcagccgaccatgcaccaattgataaacctgctacataatctggtgttaagttttccgctgttaataaggctgaactcaccacacctgaaatcagtaagcaaagctgtactgaacgtgtcgattgcaatgcagccggactatctaacatcaggacatcttctttgagtgcatccgatgcacgctcaaggtattctttagctagagctgtttgagctaagtcgtgcagcatattgcttcgttgcacaccttgtcccggatatacccaaattgaagccatgatatctattccctaattccatgggttttctaataaaacagcaccatcaggacgttttaatagaacttttctgctattccttgcccattcttttaatgccaaaccgccttgtggaagttgaagctgtatatccacattcagccctgcttgctgaaaattttcgagtagctcaaccgcctgctttttggcaaaaggctgttcagctcgaatcaacaaatctatgtcactttgctcggttactgtttcaattcccgttgctagttcaaagccgaaacttcctgtatatccccaacattctgaaaagtttttcataatgctggaaatgctctgtaaacgttctgccaagtgctcaaactgttgcgtatctacgcgagtcagcgcttctggcttaagctgtctgctaattaaagatcttggcatttgagctgcatatcgttgatagcgaagttgtcctcttacacccacagccacctgatctacaggagtaattgcccgtcgaaccacaacaggatcaccacgttgcaatacctctctcacccaatgcggagcatcatcagccaagcaatcgaccgtcataccccacaacaaatcatgggcttcgagcttaagtttcataaccattgctcacgcaataattcacggacctttttagacatttgacggttttggccatgcagtctttgttccagtcctctcgattgctcagcattaatttctttaaacgcttgagcaattgcctgtttcgctaacaaaagatcatcgtttgtcggttgttcagggttttcaacagataacagttcagataacaaaccaagcgtggcataactttcaatgtcataagccattggtggaatgcttgaggccaattgctctaactcatcaaccgaccgtaaggtaacgcgtgcagcagattccttacccattgcatgcaccataacacctgaatcttttaaggcaataatacgattggcttggtatccatgcgccaagaaagcaccagacatcgacttaccaaccaataaactcacaattggatgacctgccaatctggctctagcatagctatctactgcacccgctaaagcttgatgaatgcccagtaattcttcacgacgcccataggcctgacttggcacatcaaccagacataaaatagcgcgtttagtttcagcctgtgcatcggcttggatcacatcatcgactacttttgccaaactccagccttctaataatccaacttctccttgttttgcccgtgggaacagattattgctgtcttgaacaacggcaatcacgcgcaccacttgctgatcaatctgaccatcagccacccaaatcgaagctggaaaaccttcaactgtcttaaaaccctgcgtaagtgctttaaaccaatgtgcaccacgagtagatgcttttaatgtatcaacggcgatattcatgtttgctctccttgatacaaagcttgaacttgtgctggggtaatctgctcagcagtatcaacttgttgtagcttttctaaatagaatgagtaatttgaactacgatgctgctgaggcacaccttgagttaaataatcaatgacttgctgacgaattttctggcgatcatcgtctacataagcatctaccaaaccactagtgaagcgctgattaccacccgtaatactccatataaatggacgatctttggcgttatattcttgtacaccagcttcttgttctatcacttgtgggccatttaaacctaaacgtccttcttgtgtcattacaatatagctacatagtccagctgcaattgacataccgccgaagcaccctacactgcctgcgaccacagcaattacgggttgatactgccgtaagttcacaattgcagcctgaatttcagcaattgcagccaaacccagatttgcttcttgtaagcgaacgccacccgtttccaacaataaaattgcagctgttggaatgcctttcagattgtcttcaaccgcaagttctaaggctcctgcaattttggcaccacctacctcacctaaacttccaccttgaaataagccttcaatagaaattaaaactactggctgttcttgaatagttccctttgcaatcactacaccatcatcggcttgcggcacaatattttgctgaaccaaccaaggcgacataacacgggcaaacgggtccaataactctcgaaaagtcccttcatctaataatgctttagcacgctctctcgcactcagctcaataaaatcttgtttatttaacaagctttgaatatcagtcatgagcaatctcctccaatgcttgttccagacgtaagcgaacgacaccgggagttgcaccaaagtcatgaatatcaatattgaccgctggcggtatttgagcagtaaaaatccgttcaaaaagattgtgccaacgtgctgcactgccatctaccgaagtcactacctgaatagaggtctttcccttttcaccgggttccatcaaaatttctaaatcgccagagcctacacatcctaccagtgctttttttacaggtggctctgtggccacaaattcaaaatgaagtgtttccataatcaaaatccctttttatttttcacagatgactgctcaacacgatctataaacaaggttgctgccaacaaatctgcggcaccaccagcagacgccttcatccgaagcagatcaatctctaaaagatgcaaagcacgtcgaccttctaagcttgaactgccacccaaatccaatacttgctgagcaccttgttgcatatgctttaaaccagatgttccagatcgataaagcacacaggtatcggtcaaatctgtcatcatggcaagtaaggcatctaagcgggcgaactcttctttcatgggtttactacgactttgataaagttgctttaacccaaaattcacaatagttggaaagccttgttgtgcctgttctttggcacctaagatgcctaatttcttttgtacttgctgaccatgactcaaagcctgctttggaataaagcgatcttcaagctgagcaatctggcctgctaactggcatagctcaacagccgataaatattgctgattactgcgcgctaatgctgctgcggtaaccattaaacccaaggcccaaattgcaccgcgatgtgtattgacaccatttgtcgccaacatcatggtcttttcaccttggcgaccgatttctccaatgtcttcacgcaaagctaaacagacttttccatgatgctttgcagcttgcgccatcgcatcaaacataggccctaaacttttcgcagagcgctccattaactccaaagtcaggtcattgtgtgcaccactgccacggcgatcgaccaaagctggtttcggtgtcagattaacttcatcaattaacgcttcgactgccatatctgccaaaagctgactatcgctgagcgtttgatattgaacttgtgccatcattaccaactcctgaattttgcaggtggttgatataagccatctgaccatgtcaccaagtcggcaatatttttcgctgctaaaagttcacgtgtggcatcggtacggcgaatacctaaatcttcagggaataccaccagaccttcacttcttaaacgtgctgttgtttttgggtcttgagttaaaccaatactggtcacacctgccaccgcagcaatcatggcttggcgctcttcttggctgcttgctttatatagataagcaatgccttcttcggtcagtaaatgagtcacatcatcgccataaatcatgatcggggctaaaggcaaacctgccgttttagcaacatcaatcgcatcgagacgatctacaaaagttggcttgcccccctcttgaaaggtttccaccatttgtacaacgagttttttaccacgtgccaaataggtatctgtttcattagcaccttgcaaacgcatatctaaccatgctggcgtatcatgacgacgtccacgcggatcatgtcccatgtttggcgctccaccaaaaccagctaaacgccctttggtaacggtcgaagaatgccccatgccatcaacttgcaaagttgcaccaataaatagatcaacggcgtactgacctgcgagctgacacatcatgcggttggaacgtaaagcgccatcacgacctgtaaagaaaacatcgggacgagcagcaacatatttttccataccgagttcggtaccaaaacaatgcacgctttcaacccaacctgtttcaatcgctggaattaaggttggatgcggatttagtgtccagtttcggcagatttttccttttaaacctaaagactcaccataggtcggtaaaatcagttcaattgccgcagtgttaaaaccaataccatggtttaacgattgcacattatgcttttcataaattccgcgaattgccatcatggccataagcacatgcactggcttaatgtgtttcgggtcacgagtaaataacggttcgatataaaatggctgatccgccaccaccacataatcaacccaagaagcaggaatatcgacacggggtaactctgagacgtcatcgaccagttcattgacctgaacaatcacgataccgtcactaaaagcagcaggttcaataagtgctggagaatcttcggtacttgggcctgtatagatattgccttgacggtctgccataaagcccgctgagagcaccacatttggaatgaggtcgactaccaaacgcgaatatagttcgatataggtatgaatcgcaccaatctctagtaaaccatcttcaattaactgactaatacgcaaactttgtgggccagcaaaagaaaaatcgagcttacgcgcaatgcctttttcaaacagatcaagatgttctgaacgccctacgcttggcatgatcatatgcaaatcatgcaaaatatccggattggtttgagccaaagagcgcgataaaaaatcagcctgcttttggttattcccttcgagtacaactttgtcacccggtgtaattaaggtttctaaaactttaataatgtcctgagttgggattaccacaccatcggtatattggtttgccatctctagttttagttgtttggcatgacgccgctttgtccataaccgttctttattctgaactgatccttccatgtacttacctatagatcgcagttttgttctgaatctataaaaacgctttatgggcttccgatcaatcaacctacttctttagttattaacttcaggttaatgatctattttaaggtggctgaaaaagaatttgagggaataggcacattaaatgtcttagataaatagactttttagaaaactggaacagcaactgttttgtatcaaattatcagatgatagaatattaaccctgattattcagctacaattacttgataagaaatagtttatgaaaaagaaatattgttatgcctgccaccaaaaacacctcaacattttcaagctgagctgttgatacttgcttactatataaaaactcagcacccaaactcatcaattaacacatataattaaaggctctcatgcttcaaaacaccatgcaccgccaagtattaattttggcgagttcccaatcacttttccaaaccgtttctgtcatggtcatgaccatcggtggcttggctggggcaaatattgcaaataccccaacacttgcaacgctgcctatcgcctctatgtttttgggtacggctttaatgatgttccctgcatcaatgctcatggcacgtgtaggacgacgtaacggttttctatttggcgcttttttaggtgtgctcggtggcattattgcatcaatcggcattttttatagttcactcatgcttctggctttgggtacgctatgtgtcggggcctatcaatcctttgctcagttttaccgttttgctgccagtgaagtggcaaatgatgcgttccgctcacgcgctatttcttgggtaatggcaggtggaattgttgcagcactgattggcccaactttagcacgcttcggcggacctttattccagcatttagaatatatcggttcatttttaattattagtatcatctcacttgtggcaatgggcattttatctaacctacatattgccgatatagttgagcagaaatccaactttactgctggtcgtccgtggcaacagattgtctttcaacctacctatttagttgctttatttggcgcaataacaggttatggcatcatgattttaggtatgactgccacaccaattgctatgcgacattcacaccatgaacttgggtcaattacgacagtcattcagctacatgtgcttggtatgtttctgccttcattctttactggacatttaatcgctcgatttggtgtgcttaaaatcatgtttgcaggtcttttattatttgcctgctatatcggatttgctctctcaggtattcagttcacatcttttgctatttctttaattttattaggtgtgggatggaactttttatttattggcagtacttctttactcacaggaacttattctgtggctgaaaaagccaaagcccaagctattaacgatatgaccgtttttgttgtcagtttgatttgttcgtttagtgcaggtgctttactggatttatttggctggaaagcaatgaatatggctttaataccatggctggtgattgccgcagcttctctcttctggctaagccaaaaaagagaaaagcagtttgtttaaattctttttaacgcggtttgctcaatagccattctagattttgacggaccgcaggccactcatgttttaaaatactgtaaacatgagtgtcccgcaaaatatcatctttcacaatttgatggcttcttagcacaccgtctagctttgcacccaagcgtacaatcgcggcttgactttgaacatttaaagaagatgtgcgtaactcaaccgcaatacagtttaaagtctcaaatgcatgagccaacaatagctttttacattcagtatttacaggcgtacgttgtgcagactttcgataccacgtcgaaccaatttctacacggcgatgtgcttcttcaatatgcatgagagttgtcatgcccagcgctcgccccgtttttcggtcttcaatataaaaaggcaacatagagccggatttttgcaaatcaagacgtctttcaatttcagcagtcatctgttcaggtcttggcacacgggtataccaaagattgtaaagctccccatcacaaacggcctctttgagcacttcagcttgagttacatctagcggctttaaaataacgtgttcacccaataactcaacaggtgtagtcaaagacatctttatctcctcaattgatattaagcttttatattttcaaaattatttatttaaatcagccacactgtacatggcattcgctatagtttgatgaccagatttcgataggccatctgccacgcctaaaatgtctcggcgttctttgttttgcccaagttttgattttccttgcagcttggtaatttcaatctcaatacctacaatggcttttaacatcggttcaagatagtcttttggtgcatctgacattttccatggttcaggttgagaagcttcatgggtgcgggttaagcgagccaccacaccacgaacataacgctcatcatctcgaatcgtcactttgccataagcatgcacaaccctatagttccatgtgggtacttgtctgcgctgttcatgtttagatggataccagtttggtgaaatataagcatcgcctgcttgaaaaacgaccaatacctcatctccatttttaatatcctgccaaacagaattatttcgtgacacatgggcatgtagcatgccaaatttcccttcatttgtttgcaactcgaatggaagatgatttgcatctaagccattacttccatgcgtaaaaagcaccccaaatggatgttctgtaataagagaatgcaatacatccaaacggttttctgcaaaatcatcagggatatacatggctaaaaacctcgctgtaaatatcagggctatttatattttgtgttgtaaattttctggtttatgtggtttattaaaaagaaccactttgtatttttttaagtagaccagaattatggcaagaatggcaaaagttgtggaacttccgtctattgcaaagattgataaaagcaaaggaaagataagtgctcaactgactcaagctttacgtgaagctgtacaaagtggtgatttacaacccggcgatccattgccttcttctcgtgaactggctttaaccctaggtgtcgctcgcggaaccattattgaagcttatgatcagcttttagctgaaggtgtgtttgactctcaaccacgaactggcacttatgtgtctcatgctttggttaaaacacctgtaatacaacattcatcaaaagaaaataaacctaactcgatatctttgaccaaatcggcacgttcatatgccaaagtgcttgatgaatttaaaccacttccccatgttccttttgcggtatctgtccccgttggacgtactcaaccaagtgatatttggcgtaaatttggtaataaatttagatcacggggagcaggtgctccatcaggttatggcgaacctcaaggggtattatcactaagaattgctatagcagactatgtacgacggtcacgttctgtccactgtgaacctgaacaaattgtgattacacccggcattcaacaatcactttatatttgcagccaaattttatttgaggcgaaagatgaagtttgggttgaagatcctgcttatcgcggtacaacagccatttttgagcatactgtacaaaacattcgaatggtgcgtgttcctgttgatgaagaaggcattcaggttgaaaccggaattaaactttctaaacatgcgcgtgctgcttttgtaacaccctctcaccaatatccacttggcatgccgatgagtctagcaagacgtacagctttattagcttgggcaaaacaacaaaatgcatggatcattgaagatgattatgacagtgaacttcgttacaacggtcagcccttcccatctttgcaaggcatggcacctgaccaagtcatttatcttgggactttcagcaaagtcttatttccatcgcttaggcttggctatgcagtgttgcctaaagaactggtagctcctttttgtgggcttagagtcttaattgatagacacccgcctgctgccgaccagcacgttttggctgcttttattcaagagggttatttagagcggcatatacgacgtactcgaaatgtctatgcagaagttcgagaatacattattggcttgattgaaaaatacatacctcaagaactggcttggttacagccaggcgatcaaggcatgcatatggtgttatggcttgctcaacatattaatgatattgacgttgcaagctcggcagtcgatgcaggtattgccatcaaagcaatttcaccgacattttcaaaagagcggcgacgttcgggtttaattgtcggcttaggcgattttgaacccgaactaatgcaacaagctatcaaaaaattatcaaagattattcaacagcacgccaagtcaatgtaggtaaaccttacaacagcaaccatagatgaatcgcaaatggtccaatgagtaccattaaaataccagcaataaccatggttaaactggcaatcaccccttcttcactattgcgctgctgtgctctaactgtaccaaaaccatgcgctgcgttacccaaggcggcaccatttgccacattagaacggattttagtaattgccaaaattgcatcgccacaaatcataccgaccaaaccggtaataacagtaaatagggaaaccaatgccgccgaaccatgaatatcttcagctaaaatcatggcaaaaggtgttgaaatagaacgtgccatcaaactgttggtgacttcagggctaaagtggaaccactgcgccattttataggcagtcatcacgcctacactcatgcccacaataatcgcaatcgtaagaactccgaggtttttacgaatcgtttcccgataacgataaatcggtatagcgaaagctaccgttgcaggacctaataaattaacaatccactgcgtatcttcagcataagtttgatatgaaattccaaaaatcgtcatcaaaatgatggtaagtacaggcacactaattgcgggtgataaccaaagttttggatgtttctgatagattcgctttgccacaacataagcgaccaaagtccagatgagacaaagaattgaccagatattcatgtcattatgctctttagatatgcttatgttgaagacgttttctagcctgtaagtaagccttcaaacgattgtaataatgaatagtcagtgaagtgcttaacatgactaaaatggttccaaccgcaatgcttaagacgatttgccatccttcggtcataaacagggttttatactggacaacggcaacgactacaggcacaaaaaacagtaatagctcacctaaaaccacagttgctcccattgccacctgatccattttgataattttaaagaacaggcataaaagcaataaaaacatacctaaaatacctgccgagacaggcacaccgagtttttggtgtaagagatatccgatccaccaaaatccagccaaaatgagaatttgtttaactaacacgaacagtgatggttgtgagggtgttccagaagcagattcagtactcatttttcgaaattaaatggttaactacactattatgctagcttggttaaacctgctaaatatgaattattcatgttaatattattccaaaatggaataatctattctttattatgctttctctaaaatcattacagtgctttgttactctggttaaaactaaaagttttacccgtactgctgaagagttatatctgactcagcccaccattagtaaaatattacaacaactcgaagagcagcttcaggtacagcttttggttaaacccgatcatggacgaaaaagacaaattgaattaaccgaaattggagaacgtatctatcaacatgcggtcgagcttcttcaggcagagcaaaacatctttcttgaaatagaaaactatcaacaattaaaaacaggtactttaaaacttggcgttccacctttaggttcgcagctcctaacgactgccctatttgactttcatcgccaatggccagatattgaattagcttttatggaagtgggttcacgcggtattgaacaggctttactcaataatgagctagacgttggtgttttattgcaaccttttgatgaacaaacttttaatagcatcgagttatgtaactaccctttaatggtacttttacgtcgtgatgcaacttgggcaacccgcaaaaaaataaatctagaagagctacaacaccaatcatttttaatgtttcctgaaaatttctctttaaacagtattattctcgatgcttgtaagcagcatggtttttacccaaccattgcttgccgtaccagccaatggcatctcttggcagacatggtgttacaacgtatgggaattgcgcttcttcctcaatattatacagacatgcttgacccaactttatttgcagcagtgccactcgaaaaaccaaatattcagtggcacttagtgatggcttggaaaaagaatcttcctgtctcaccagcagtacaagcttggcttagcattgtccgtcaacattttcagcacattaaaccctaacgttgaccactgaaatagcttagttcaaaaaccgataaagcttttccacaaaaaagctacccaatcttggcttagctcacttagactagacccatctgtttatcacacggacaataacaatgaataacgagtattttaagctgtatacagattcacaatttctaagtccctatgcatttacagtttttgtaggactacatgaaaaacaaattccatttgaaatagcagccatcgacttaggtcagcaaggccagtttgaaacatctttcgtagaaaagtcattaacagctaaagtgcctgtacttgagcataacgattttgccttatcagaatcttctgccattttggaatatttagaagaactttatccagacacagctatttatccaaaagatattcaagctcgcgcaagagcaagacaaattcaagcatggctcagatcggacttagtggcactaagaactgagcgtccaaccgatgttatttttattcagcccaagtccactccactttcagaagaaggcaaaaaagcagccgagaaacttttctttgttgcagaaaaacttcttgcgtctgatgccgaatttctttttggttcatggagcattgtagatgctgaacttgccctgatgttgcaacgccttattcaaaatggtgatgctgtatcagagcgcctaaaaaattatgcattacagcaatggcaacgtccgtctgtacaaaaatggcttgccttgcgacataaataaatccttatatttacaccaaacatgagataaaaaatgagtgattcaaactatattcctccacaagtttggcaatggactggagagaaaaccgatttaaaccaacctacctcaggtgctcgttacgaacatgcacttccagtagggaaacatccgctccagctctattctttagcaacgcctaatggtcaaaaagtcactattttattagaagagcttttagctctaggacaccaagatgctgaatatgatgcttggctgattaaaattggtgaaggacagcaatttggtagtggctttgtagaaattaatcccaactctaaaattccagcattggttgaccatagccaaaacccgccattaagagtatttgaatctggctcaattttgctttacttggctgaaaagtttaaagcattcattccgactgatattgctgcacgtactgaatgcctcaattggttattctggcaaatgggcagtgcaccttacttaggtggtggttttggacatttttatgcttatgcccctgttaaaattgaatatgcgattaaccgctttgcaatggaaacaaaacgcttacttgatgtattagatcagcatctggcaaaaaacgaatatttggctggttctgaatatagcatcgctgatattgcagcgttcccttggtatggcggtcttgttaaaaactgggtatataacggcgcggagtttttaggtgtcgatcaatataaaaatgttcaacgttgggcagatgcgattttagagcgccctgcggtacaacgtggccgtatggtcaatcgtacttttggtgatttagccacacagttgcatgaacgtcatgatgcgagcgattttgagaccaagactcaagataaattgcagaatcagtcttaaaaatatcatttagtttttgacttacccgcaagatatttcatttttgcgggtattcaaagttggcaaaatagcccgtgtataactcactcagccaagcgacaaaaactcgtacgcgtggcgagagctgccgatgctgcggatataatgcagaaactgacatcttcgggatttcccactcagataaaacctgaaccagacgcccattttttaattcatttgccacatggtagcgcggtacttgaattaagccagccccttgtaaggcagataatacatagttttcagcatcatttaccgcgatccaacttttcaaaaaataatcttgttttttgctattcaccatcaattcaaatgggtaattccgtccgcctgatgtcgaaaagaaattgacacaataatgtgataataaatcttctggttgctgtggcgttccatgtttatttaaatagtcaggacttgcacaaatcacttgtggcatatcggccaaatgtctagcaattaaagtggaatcatctaaacggcccgctctcaccacacagtctatcccttccctaatcagatcaactaagcggtcacccgtactgattaccagttcaatgtcggggtataactcgtgaaattgatctatattgggtaaaacaattttagttgcatgtgcgcctgataaatcgacacgtaataaaccacggggctgagcaattacattgcgtaaagatgattcggcatcatcgagttccgataatatttgtgtacaacgctcataaaatgcctgtccatctagtgatggtcttacatgtcgagtcgtccgctctaataaacggcactgtaaattactctctaactccttaatggcattacttgcagtagcacgtgggatatttagctgatcggctgcctgactaaaactacccagctctacgatgcgggtaaaaagttgcaaggtatcaaatttatccatggtgctcgcttttaacccttcctattattaatttatatggaattatcttatccaattctgatgatttatcccatatttctatattattaaaataagccatacttactcaaacaggcaatctaaaaatgaatatttcaataaaaacagctctggttactggcgcatcacgtggtattggccgtgctattgcagaacgcttagctcaagatgggttttatgtgattattaactatgttggcaataaagcgcatgcccaagccactgtagaacatattattgagcaaggtggtcaagcctcagctattcaagcggacgttgcaaatgaacatgaggtgagccgtttatttcaagaagctaaagcgattaacgggcaattagacgttgtggttcatagtgctggtattatgcctatggcaaaaattacacctgaaagcctgccagatttcgataaagtgattcataccaatttacgtggcgcgtttttaatattggcgcatgcggccgaaacagtgccagatggtggtcggattattgcgctttcaaccagtgtaattgccaaatcttttccggcatatggtccttatattgcttcaaaagcaggtgttgaaggtttggtacatgtgttagcaaatgagttacgtggacacaatatcactgtaaatgccgttgcgcccggcccgacaggcactgaccttttttacaatggaaaaactgaagagcaagtggcagctattgcaaaacttgctccattggaacgaatcgggacacctgacgaaattgctggcgtagttgccatgctggctggtccagatgggtgctgggtaaactctcaagtcatccgggtaaatggtggatttgcttaattttaaaaaccgtgcggattattttaatctgtacggttttttactaaataataaaatttcttaaatctattttattttaataactttataagattaactaatacttttttatataaaatattcaccgctcttatttatcaaaataatatatataaatagatattccttatttttgcttatatttaaaaccgcgtaaattgaaccttaacaatctgaatcaaagataaggatatattcaatgaacgctaaattaaatactgaaactccgcaaagttttatctcaaatggttcaaatacgtccttttcagccgaagatatccttgctaaagcacagcaatatgcacaagaacacgaactaaattttagtggcagtttatcacctgttgacgcatggcaactcgtacaacaaggagaagctgttttagttgatgtgcgtaccaatgaagaacgcaaatttgtgggttatgtccctgaaagtatccatgtcgcttgggcaacaggcacgtcatttaatcgtaatccacgctttttaaaagaacttgaatcaaaagttggtaaagacaaaaccattcttttgttatgccgtagtggcaaccgttcagcacaagctgccgaagccgcatttaatgcaggttttgaacacatttataacgttcttgaaggctttgaaggtgatctaaatgaacagcaacagcgtaatcagaaaaatggctggcgcatccaccaacttccttggcaacaagactaatacttcaatcaattttcagtgaatcaaggaaagcttgtgactcaatggaacattaatgcggttgtacaaggtttacaacaagcaaggcatgactggcgtcagcagcaacacaggaccaaagaatttgggggccgtgaacttccatctaaagaagctttaaaggccattttagatgacctgtgcgggattttatttccaatgcgtttaggccctgccgacttacgtcaggaaactgaagattcttatattgcctatactttaaatcgggtactaacagctttatatgctcaagtacaattggctttaaattatgaagcgaaacgacatttgagtcattcaagcccagtgcagcagccacaagaacttgctcaaactattgtgcaggattttgccaacactttgccctctatacggcgccttttagacggcgatgtgcgggcggcttatgaaggtgatccagcagcacatagtgtagatgaagtattactctgctatccgggcatatttgcgattatctatcaccgaattgcccatcagctctatgctcaagtgcctttattgtcacgcattatttcggagttggctcactctgcaacaggtattgatattcatccgggtgcgcaaatcggtaaaggatttttcattgatcatggtacgggtgtggtgattggtgagacttgcgtgattggagaacgcgttcgtatttatcaagcagtgactcttggagcgaaacgctttgaaaccaatgatgatggcgctttgaaaaaagactatacacgccatccaattgttgaagatgacgttgtgatctatgcaggtgcgactattttaggtcgtattaccattggccgaggatcaatcattgggggaaatgtctggctaacccatagtgttgctgcaggtagccagattttacagtcaccgaatgagtcttatcaaaaaaatcatattgccggttaaaaactatagatgtgaaataaatagataaggagataaataaacaaagaacgtgcagattaataaaatgcttatttctagtttaaatatatttttatttagaaaatagataactcattaataagctcagtatttaaaaaatttataacgcgattttaattttaaaaccagaactaattctagtttatatgcatcctagaatttttattttcgaaaagccaatgtaataaggaaaaatgattcatggcgaaaaatacagacaaagcccaacttgcacttggggaccatgcggcccgtcaactggccaatgcaaccaagacagctccccagctttctacaattactccccgctggctgactcacttacttcaatggattcctgttgaagcaggtatttatcgcctaaaccgtgtcaataataccgatgatattcaagtagcttgcacacaacgtgatgaagcaactttacctcaaacttttgttgattatgacccagagccacgtgaatactttttaaatggtgtatctactgttttagatgtacatacacgcgttgccgacctttacagcagcccacatgaccaaattaaagaacagcttcgcttaaccattgaaaccattaaagaacgtcaagaaagtgagcttatcaataaccctgaatacggtttactagcaagtgtgacagatgaccaacgtatttcgactttaaatggcccacccactcctgatgatcttgatgatttgctacgtaaagtctggaaagaaccgggatttttcctagcacaccctgatgcgattgcagcatttggccgtgaatgtacacgccgtggtgtaccgcctccaacagttagtctgtttggttcgcagttcattacatggcgcggaattccacttattccatcaaataaaattcctgtagaagatggcaaaactaaaatcttgctgcttcgtgttggtgaaaagcgtcaagggattgttggtttgttccaaccgggtcttgcgggtgaacagtcaccggggctttcagtacgttttatgggaatcaaccgtaacgcgattgcgtcgtatctaatctcattatattgctcacttgcagtattaacagacgatgctttggcagtgttagatgatgtggaggtggacaaatatcatgactacccagttaactacaagtaatctgcaaggtagtccaacggggcctgaagtgactggtgttaacccaccagccaacttccctgatgagtccaccattgctcgacttgctaatgagtttttttcagcagtgccaagctcaagcagttcgacttcttcatcgggccttaacttggacttacctgtcggagcgccacctcacccaccgcaaccgggtgaaccattttctgcactcagtggtcgtgcgcccaatatcgcctttcagaaaagtctcaatccggaatatcctgagcatattccaaatttgccagactaccctgaacgccgaattgtagcgtctgcgcctgtagtgggtggagctaatttgccacgcccaccatttgaaccacacttaccacaagctgctcatagtgaacccaatgtgccacgcattgaacccagcttaccaacgggtgcaggtgaatcaccttattattttttaaatgatttttctgcccccaatgcaacagaaccatctgttaaaggtgttgaagataattattcggttgcacagtcatttcaattaccacatggtgaccagctcaagtcattactgacggaagatcgttttgcaacgaacacgcctacccaaagttcagcaagctctgcattttattttttagacttgcctcaaagtggacaaagttatagtcactatcaaccatcacaacctacttttgtggtaagcagtgcgcaaccactcgatgtgcatgccatccgtcgcgattttccaattttgcaagaacgcgtcaatggccgtccattagtctggtttgataacgccgcaactacacaaaaaccgcaacgtgtgattgatcggattgcttatttttatcagcatgaaaactcaaatattcaccgtgctgcacatgagttagcagctcgtgcaaccgatgcctatgaacatgcgcgaaatgtggttgctcgatttattggtgcaccctcttccaaagagattatctttgtacgaggcaccaccgaagggattaacctgattgcaaaaacatggggtgagcaaaatattggtgaaggcgatgaaatcatcgtttctcacttagaacaccatgccaatattgtgccttggtatcaactcactaaaaaaactggagcaaaattacgagtcattcctgttgatgacacgggccagattattttagaagagttaccgaaactgattaatgagcgcactaaactgctgtcgattactcaagtttcgaatgctttaggcacagtcacacctgttgctgaagtcattaaaattgcccatgccaaaggtgttcgtgttttagttgatggtgctcaatctgtttcgcacatccctactgatgtacaagctctcgatgcagacttttttgtgttttctggacataaagtgtttgggccaacaggtattggcgcggtctatgcaaaaccagagctgctagaaagcatgcctgtttgggaaggcggcggtaacatgattcaggatgtgaccttcgaacaagtagtttaccaacctgcaccaaacaagtttgaagctggaactggaaacattgccgatgctgttggtttaggcgctgcgcttgaatatgtcgaaagtctaggcattcataacattgctcgctatgaacatgatctactcgaatatggtcaaaatgcgctgagcagtgtgtcaggtttacgcttgatcggaaccgcacatcacaaagccagtgtaatgtcctttaccttacaaggctattcaaccgaacaagtcggtaaagctttaaatcaacatggtattgccgtacgttctggccatcactgtgctcagccgattttacgtcgctttggcgtcgaacagactgttcgtccatctttggctttttataatacgacagaagaaattgatttattggtgtcggtgttacatcaactgacgcgtaataggcgtaccagttaaatttattaaaaaagactgctttcgagcggtctttttttatggattctttattgaagctactttagctctaaagtcatatatagatgtaataagtcaaagtagttatcacggcggaatcttattatttttaaattcgatttctaagttagccttcggctcgagctaaaagtcattaatactctagacaatttaaagtaattatcacggcggagtcttatgatttgaaatttgattcctagcttagccttcggctcgtgctaagagtcatctacagcctgcccataatttataaaaataatgtttttgcaacatttcctgatagatgaaaacagtgagcaggttctgtagatgacaaagttttttggttactttttccaaaaaaagtaacagagttagctactttcttccaatgtataaacggtaagactccgtcgcgctaccccatccacttataaataaaattaacttaaacaaacaaactccaaatcaatctcaatgcaatcccaatcaacaacactcccatcaccctctcaaaataaaccccaaactccaaaaatcttttacgtacgataggctgtgcaaacagtacactcaccaccataaaccagatagcattgaccatacacatccatatcccataaaaaacctgaactttcatcggtgtggtcgtacttacaatcgtcgtaaaaattgccagaaaaaagatagtggctttggggtttaacgcattggtaagaaaacccatggtaaacgctttaaataaacttggcgtgtcactacctgcttggccattaatttcaatattggtattcggctggctacgtaaacactgccatcctaaatacactaagtaagctgcccccgctgttctgatcagtgacatgagccattcgctttgttgaatcaaaaagccaatcccaacaagggtataaaaaacatgtactgaaatcccgacaccaataccaattgcagtcagacatccaatcaaatagccataacgtacgctttgccttaccgtaatcacaaaatctggtcccggtaaaatcaccgccataaagtgaataagagctagcgttaaaaactcatgcccatacatctgccacataacaatttagtttcctgaaaatcacctaaaagattgtattgcgattttttaaacgcgataatccaatcaaaatccaaataacttttgcctcatgagcacaaatcaaagtccggttctgttaaatgaaatggcgaccttcgttaaggttgtcgagtcggaaagcttttctgaaactgcacgccagctaggtacaacaccttctgctgtgagccgcgcgattgcccgtttagaacgtgctttaggtacccgcttactctatcggactacacggaaacttcgtttaagtgaaagtggtcaacaggtctatcaacgttgtttagatatggtaaatgcggcacaagcagtcatggaaagttcaggtcaatttcatgtcgagccagaaggtattattcgtatgagtgttcccaaagctgtgggacattttatgattcatccgcatttacccgagtttttagaacgctacccgaaaattgatatacaaatgcttttagaagatcgttatgtagatctcattgatgatggagtcgatttagcacttcgaattacagagcaaccatcaggtggccttatgggtcgaaaactcattgatattgatcatttggtttgtgctacacctgaatatttagcaaagcatggcactccgaaccatcctcatgatttaaagcagcatgaatgtatctacttgggtgaacaagccagtgactcaaaatggaaatttcaacaaggaaataaatcgataagtgttgccgtgcgtggtcgttatgcagcaaaccatacgggtgtgcgtttgagtgctgcattacagcatttaggtattgcgagcttgccatacttcgttgcacgccatgctctacaacaaggtactttagttcaggttttaccagattggtattttaagacctattatagcggtgggctgtggttactctacccaccgacacggcatgtcccgcctaaattgagtgtgttgattcaatatttggcagataaattagcagcagagccgactttatttaagttaaagtaatataaagtcaaagaattagcacgattgaatcctacctttaatctctaaagcaatcagctaattctgttacttttttttggaaaaagtaaccaaaaaactttctcatctacagaacctgaccactgtttacatctataaaaaatattgcaaaaacattacctttataaattatgggcaggctgtagatgaatcttagttcgagtaaatactatctagagttctaatcattagaggttattagcacgattactcaaccaataaatcttttggattaatcgtatcgccatagactggttttaaggttttttcataagcctgatgaatcacgccttcttttgccagtttctctaaatcttggttcaaccagtctaataactctttatcaccctttttaactgctggtgcaattaagtcctgctcacctaaattggtaatgccaacggtgtaatttggattttctttagcccacgctaaaaccagcaagttatcatgggcaagcgcagcaccacgtccatcttttaaagcatcaaaagtttcagtgttttgttcatacttttgtagtttaatttcaggatgcgtcttggtgaagaatgaatcagccgttgtacctttgtttactagcaaggttttatctttaagttgagctacatcggtaattggatggcttttaggagaaaccacaccgagtgccacttttaggtaaggcttagcaaaatcgacaacttccttacgttctggcgtaacagtaaagttggcaaaaataatatctactttattggcttttaaatattcgacacggttagccgcttcagttaaaacaaactcaactttgttttcatcgcccagcaaatctttagcgacatgcttagcaatctctacatcaaaaccttgatttttaccttgagcatccaaatatccaaacggcggtttatcactaaatacgccaattcgtaccacgccattctttttaatctgttcaatactcgatacagtttgtgtggtatcggccgttttttcagtagactgagttcctttgtcacatgcaaccaaacctaaactcagtaaagacgcagctaaaatatgcttcacgttttgaaatgttaatgttgtcattatttcaccctctcgttcttgtaaaagtcttatttagaatcgcagcgcctacttttaggcactgctctagcgatatcgaaaattattgacctacatctaaaaacacattcggattgactgaatcaccgtaaattggcttcaaggtttcatcataaattttcttaatttcaccgcttgttctgagctgcttaatttcagtattgagccaattcaatagttgggtattgccctttttaaccgctggtgcaataaactcttgatcaccaatagactgaatacctgccacataacttgggttcttcgcggcccaagccaaggcataagtactatcttgtgaaatcgcgtcaccacgaccgtcggttaaggctttaaaagcatccgaatttctttcgaacttgagtaaattcacttttggataatgcttggtaaagtacgtatctgaacttgtgcctttgtttacaattaaggtcttaccttctaattgagcaatatctgtaatcggcttggctttaggagatactatgccgaaagcaccttttaaataaggctcagcaaaatcgacaacttccttgcgttcaggagttaccgtaaatgtcgcgaatacaacatcagctcgatttgattttaaaaactccacccgatttgaagcttcagtcacaataaactcaactttcttttcatcaccgagcaaatctttagtcactcgttttgctaaagccacatcaaagccctgattattacccgcactatctacaaaaccaaacggcggatcatcggcaaaaacggcaactcttagaactccattttttttgacttgttctaaagaatggtctgcttgagcattacttgcctgttcagttgatggcgttttactacatgcagttaacaacaccccagcaacggcaagactgcttaatatttttattgaattacgtttaaacattcacttcctcatgattcaaataataaaaatttagtacgacaaaatatttaagaaagctttcgctcgttctgtttttggctgttcaaaaaattcttctggtgaagcctgttcaataatcttgcccttatccataaaaatgatgcggtcagcaaccttacgggcaaaggacatctcatgtgtcacaatcaacatggtcattccttcattcgccaatttgagtactacatcaagcacttctctcaccatttccggatcaagcgcagcggtaatttcatcaagtaaaatcacttgaggttgcatgaccagtgaacggacaatggctatacgctgtttttgtccgccagaaagttgtcgcggataatcaagttttcgctcatatagcccgactcgctttagcaactcatctgctacttgttctgcttcatcgcggtgacgtttttgtactttaagtggcccgagcaaaatattgtcaatgacgttcatatgcccaaataactcatagttctgaaaaaccatgccaattttttgacgagcattagtccagtccacatctttgcccaaaacacctgagcctgttaaacgaatctcgccaccctgaatcggttctaagccgttaatacagcgcaataaagtacttttaccgcagcccgatgggcctaaaataacaaccacctctccttgttctacatccagatcaatgccctgtaaaatatgactttgtgcaaatgatttctgtaattgttgtatcgataacaaaggcataattactcccagaccttttctaaatgtgccgccaaacgagataagggatagcaaatcagaaaatacaaaataaaaataaagccataaatccaaagagaagcgcttggcacggtcaacagcgaattttcaataatttgctggccaactttaatgacttcaaccacgccaatcaggactgccaaagagctggttttcaccattcgggtaaataaattaatcgcgcctggtgttactcgttttagactttgcggaaaaatgacgtagatcaaagcttgaacatgagttagtccgagcgcataggccgaatcgcgttgatgctgatcaatcgaagtaatggctgcacgaaccaaatcgcccatttctgccgtaccccataaaacaaatacaacaatgcatacccacattgctgaaaactgccagttaaaccatgtcgcaaagccgaaataaaacacaaatagcaaaactaaaattggaatgattcggatcgcttctagatacaggcggcacagcgctttaacgactatattcttagaagtcataatgacgccgaagactgtcccgaaaattgcagagaaaaacactgaaataaatgcaatttttgcagttgcccaaagtccccacattaaacgttcgaggtgactcgcttgaaataaataatcaagttccatggctcaccttccgacttctgtgctctagatagctggttaaaatagacacgggcaataaaataatcagataagccatgataagtaagaacaaagcttcggtggttttatagtccataccaattaagtctttggtgacaaaaagcagctcaacaacagcaatggcactcaccacagaactttctttaattagaaataggcaatttgcccctattgccggaattgaaatggcaagcgcttgagggaaaatgacatatctaaaaatttgagtcggttttagaccaatactttttgctgagtcaatctgcccttttgcaacagactgcaaacccgctcgaaaagcttcagccatatagcttccgcctaaaaaggtcagtccgatcacaccacaggcaaaaccatcaattttgataccgagttttggcaaaccgtaatacaaaaagaacagttgaattaataaaggggtatttcgagataactcaatatagaactgggcaattctatttagcacccgcacgtgatatgtgattaaaatgctgcaaattagccctacaataatcgccaaaataatgctgataattgagattttcagcgtggtcaaagttgcagagaaaaattgcggcaacacactatggatatactgccagttcaaggaaaattccaacaaataatattaaaacgttataaatatttagctttcgtcagccattaaatatttgtgtaacaagtttatttttttcccaattggtctaaaactatttttattagataagcttttctataagtttgataaattcgatttggcaatcgaaaaccttcaaatcagttgaatagaacagctcaaaacatgttcactaaagcaaagatgagtagtaaaactaataaaaaaaatcggacaccaaggcccgatttttattaaatgatttttaatctattgtttattttctaagtacatcaccaatgcttgggtctttatcaaaaaccgattttgcatatgggcaaagtggaattacttttacgtctttttcacgaacaaaggcaaccaaagcatcaagtaattggcgacctacgccttgtccacgataattttcgtttacatctgtggcatcaataattagcatgctttcgcctgcccatgtataagtcatttcacctgcaacggtttcaccatcaagtaagctaaagctgccgtgttttgtatcatctttttgttgaatattcacaatgaattcctcatattacaaatcgtatttatttaaaaatgactttgtataatctttatctataagaacaaatttaactgtaaaaaaatagcctatttttagcagtgagtctgtatgctttttaaatacaatcttcacttaaattagtgaaactcttgcaccaaactattaatatgcgccaccgcagcagttcggttttcaacgcaaagtttttcaaaaacatgctctaaatgtttattcactgtccgtggactaagctccaaaatttctgcaatgtctttattggtttttcctaacaacaaccagtgcatgacttctgcttcacgttgagtcaactgcgggcaatattttaaaatatcagccatttccaaagctggcgtagaagtttttatctggataagataattttttgccacacttggttcagtttcccacggtgtaagcaataaaagctgtaattgctgagatggtgttgaataagaacagctggttaattttttagggtctttttcatgctctaagtctgaaaaccaagcttttaagcctgcttcaaaaccttctaattcaggtaaatattgatttagtagatcactggctttttgggttttccacacaattttaccgtgaacatctagcgcaagaatggctgtttccgttgcatcaatcacctgtttctgttgctgcaatagtttggcatgtgccaaatgtgtttttacccttgctaatacttcttcaatattcagtggcttagttacgtagtccaccccgccgacctgaaaaccacgcacaatatgctctgtctcagacaaacctgtcataaaaataacgggaataaactgcgtaattggactcgctttaagctgtatacaactttcaaaaccgtccatatgtggcatattgccatcaagtaaaatcatatctggtaagcatcggtgtgcaatttcaattgcacttaacccatcggttgtaacaagcacgcgataacctgcctgatccagactttcatgtaacaagcctaaattttccggcacatcatccacaatcagaataacagcctgctcgtttggtgaagcttgctgaaaagaaacatgttgcgtactcattgcttatcctgaattaaccgttgggcgtgttttaaatcaaatttttgaatcgcctgttcaagctgttcccataactcgttatgctttggaaaattttgacgacattgcgttaaagtctgttgaattccacgaatgtacccctgtccaatcaagtcatttaactgttgtaagctttgcggaaaatcgagcagctcattattttccggttgttggattagcgtatgaacagcaacttgctcttgcttatatatatttaaatcgagtgcttgaacttcattattttcaaggagtgtctctgatttggaatcaatccacaccaagcccaacttatctccaattttactcagcaacaaattgagatcgattggttttaacataaagtcttcacttaagaccgcatcttgtggattgacttcacgctctcctgcattcgctgaaataattaagatcggcacattggtaatattattctgacgcaataatcgtgctgtttcccacccgcccatcaaaggcatatttaaatccatcaaaatcaggttcggctgaaaaataggtacacgtcttaaacaatcaatgcccgactcggcttcttcaatcataaatcccaaaggtttgagaaaattagcgactaggcctcggtccacagcttcattatcgacaaccaaaattcgttttcgttcgccttgataacccgtaatttggttggagtagacattagaaattggatgaactacttcttttgaaggtaaataaaacttaatcttaaattgtgaaccctgattgagctgactggtcacagatagctggccaccgagtaaatcgaccaacaattttacaatgggtagtccgagtcctattccggtaaatccgccttgtactacattgctgccccgttcaaacgggttaaagattcgctctaaatctgcctctgcaataccacagcccgtatctctaatttcaaaataagccgtttgaaaacggtattcgacttttaaagtaattgtgccgcttgtcgtaaactttaaagcattgcccagtaaattgatgagcacttgctctaagcgttttttgtcggtacgaacgtagtgcggtaggttttctccaatttcataaacaaactgtaaattcttctgttcaaactgtggctgaaacatttgaataatctgttcaataaaattggggaaatgcacatccactacatttaaagaaatcttgcctgtttcaatgcgtgctaaatctagtaaaccgtcaatgagtgaagtcaaatgctgcccactacggctaatcaccccgagcgccattttgccttgttcagagagttgttcttgtttttgaagtaattggctatagcccaaaatactatttagaggcgttcgtaattcatggctaatgccaatgacataacggctttttgcatcattggcccgttctgctgctattctggcgtcttgtaagtcttttgaagtgacttcatgggcagcaatttcatcaatcaataatgctgtttgctgatgcgtttcgatttcggcattacgtcggctttcatcgtttaacactaaccaccatgctgcaacactcatcaataaaaataaaatggtgtaaatttttacaaacagtgtaaataactgcggaacggctgcggcattaatggtttctaaataggttttttcttggatataaaccagactcaagctcactgccaaaacaatagacagccctagagtcagtaataaatataaactgaccctgctatttaaacggctcgcccaacgttctggtaaataatgccaaatggcttttttgagttgtactgaccaacgtgcatcgggtttacataaatcgtggcagcgtgcttctagtgaacagcatagagagcaaatcgtaccgttataggctgggcaacccgccatatcagcaagctcatagtcccgttcacacacgacacagttagcaaccaaagtcgcctgaattttttcaggctgacgtgcaatgtaatatttgcctgtggttaggtaagcaataacaggaacgcataaaaccgcactccccaaagcaataaaacttgctaaacctttcgccatgagaccgaaaaagcccaaatagctcagcatcgataacactgaagcgatgagtaatgcgcccacacctacggggttaatgtcatataaataagcacggcgaaattcaattcccttcgggcttagacctaaaggcttacagataattaaatcggcaacaacggcgccaatccatgccaaagcgatattgctatatagtcccaaaatgcgttcaactgcatggctaatgcccatttccattaaaacaatggcaataaacacgttaaaaagaagccagacaattcgtcccggatggctatgagttaaacgagcaaaaaagtttgaccaagctaaagagccagcgtaggcattggtcatattaattttaatttgtgccaagcaaaccagtgctagagtcaatattaacgctagctgaggatttggaataaactgctgataagcaacccaatataaataagtcggattgtctagttcagagacaggaataaacagctgaaaagccaacaccatcagcagcatgcccatcaaaacttttaaaaatccaaaaataatccaagatggaccacctaaaaaaacggcaaaacgccatgcagttctattcttttctttttgcggtaagaaacgtaaatagtcggcttgctcaccaatttggatcacaaatgaaaaaataagagtgcacgccgcaccaaagtaatacagattaaaatcggtcgagtttgaaactgccccaacaaaatgcagactactacttaaaatttgtggttgtttccaaagtacaaaaaaccacggtaataacagcaataagagccagattggctgagtgactgcctgaactttgttaataaaaccaatgcctttgaccactaaaggcaaaatcactaaggcagaaattaagtaaccaataacttgcggaatgcctaaggccagctcaagtgccatcgccataattgcggcttcaaacgcaagcaaaataaaggtaaagctggcataaatcagagatgtaatggtcgagccaatgtagccaaaacctgcaccacgagtaagcaaatcaacatctacattatattttgcggcgtagtaactaatcggccaactggttaaaaatataatggtacatacgacaattgctgcccataatgcattgctaaagccatactgccaaagcatggttgccccaatggcttccatagccaaaaagctaactgtagaaattgcagtattggttaccgtccaaggcgaccattttcgtactgaggtaggtgcatagcggagtgcataatcttcgatactttcatctgccacccaaatattatattcacggcgtgttttgatcacacgttgtggcgcttgttggggacgtgaagtatctggcataacactcatgttttggatagggctgcattaaacccagcaatccttatgccaaaagtcatttatcatggcgattttttctaatacgcacatatacgcaaaataacgtattttcaatttttcccaaaaatcacacactcaaaaccatcaaaaaacaatgatcaatatttgtgttgattgaccgaaaatgattgggagattgatgttatgagtgtatctgaacatccaaatctggacactgtgcaaggtgcagattcacaaaaagcagtgaatgaaaccttagaagattatactttacgttatgctccacacagctttcggcgctggagtcccaaagttgttgctattactgcacttggtggtattgcctatcttgctgacttttctattggtgccagtattggtatgtcttatggaacaaccaatgctgttttctccattttatttgcagcgattattatcttcttaaccggcatccctttagcctactacgcagctcgctataacatcgaccttgacttgattacccgcggtgcaggtttcggttatatcggttcggtcctgaccagtatcattttcgccagtttcacctttattttctttgcccttgaaggttcaatcatggcgcaaggattattgctcggtttaggcattccgctttgggctggctacctcatctcaaccgttatggttattccgctggtgatttacggcatgaaagctttaagtaaattacaagtctggactaccccactttggctcgttctgatgattggtccggtggcttatctgatttaccaagaacctaccttagttagccagtttgcaacgtttacaggtcatgaaggttttgcacctgtagatatggcagcgattatgcttggtgcaggtatatgcttatccctcatcatgcaaatcggtgagcaaattgactacctacgcttcatgcctgcaaaaacaaaagaaaatagcaaagcatggtgggcagcggttatttcagcgggtccgggctgggtaattttaggagcgatcaaacaaattattggggcgtttttaggtttctatttactcactaaaataccgggcgtaaacagcactgaacctgttcaacagtttaatgcggcgtttcatgacatgcttccgggctgggcggctttaacacttgcggttattttggtggttatttctcaaattaaaattaatgtgaccaatgcttactctggttccctcgcatggacaagtgcctacactcgtattagcaaacattatccggggcgtattgtctttgtgatcgtaaacttggcaattgcgcttgctttgatggaaggcaacatgtttgcggtactgggtaaaatcttaggattctattcaaactttgcaattgcatgggttgtggttgtcgcaacagacatttcaatcaacaaatatgttttaaaactttcaccaaaagaaccggaataccgccgtgacatgctctacaacgtaaaccctgtcggtatggttgctttccttgtatcagcaggtttatcgattgcagcattcttcggattattgggtagtttcctagcgccttactctccaattattgcacttgtacttgcctttgtattaacaccaatcatgggcctattaaccaaagggaaatactacatcaagtcacacgatgacggcgttaaagaaccacgttacgatgctgaaggtactcctgtagcaactgtttatcactgccgcgtatgtgagcaaggctatgagcgtccagatattatgttctctcacaaacataacggtacaatttgttctttgtgtaaaacactcgatgcttagccccctttaccaattaaaaaagaagctttaaagcttctttttttttacatctgatgatttagccaatcggaaataagcgctcaggtaccacatctttcatcacaatggttgagatgagccgttgcacacttggaatagcagataatttttcgtcatataaacgctgaaaagctggtaaatctctagcaacaacatggagtaaatagtcaggttcaccaaacaaacgctgcgcctgaataatttgcggaatctcaatcacggcattttcaaacttctcaaccgcctgtttatcgccttctttaagcgtaataaaaacaatcgctgaaaactcaaaaccgactaagtttgggtcgagttctgcccgatagcctttgatagctcccgactcttctaaagccttcactcgtctgtgacaaggtgaaatgctcaaaccaactttttctgccaactcagtgatagataatcggccatttaattgcaattcagcaagaatctttttatctgtgcgatccatttagaaaaatttaccccaaatgcatatgatatgagcaaacatttaaaagcacattctaaatacatgagcatattattttcaacaagctcgaataaatagggattttttctaaaccacgggcgaaacctttggaaaatagtttgccgagataagcatatggcttttaacatttttattgcattttggagtgtctccattctttttattattacgccaggggcagactgggcctacgccatttccgcaggtattaagggtaaagtcgtcgtccccgctgtcgcaggtatgctatttgggcactttattacgattttattggtagcggctggtgttggtctgcttgtagcaaataacccaactgctctgatgatccttactgttgcgggttctgcttatttattatggatgggaataaatttattactcacccctcctactccgaacgagtctggttctgaaaaggctcagtcatggttgagatgggctaccaaaggcgtttatgtgagtggattaaacccgaaagtttttttactttttttagctctgcttcctcagtttattgatactactgcttcatggtcagtgacaacgcaaattcttgcctttggtgttgtccacataattagctgcgcgataatttacttaatggtgggttatggttcagaagccattttgaaaaccagaccacaggcagcccaattagttggccgtttttcgggtggcttgatggttgttatcgcaacgtgcttattgattgggcaaatttaaaagtcatttaggaaaaagttactgactcacttttcgggtcggtaacttaaataataaatataagaaaaatttatctcattcgtttgaggttataggtcacgactccccaaatcaccagttcttgcccctcttcaatataaatattttgataatcagggttttctgctttcagccacactttaggggggtgaaattgggtatcaatcattaagcgcttaacagtgaaatcattgtcgataagtgcaatcactatatcgcccgatttagcgggaatactacggtccacaataagcggatcatcaatatcaattccggcatctaacatagacaacgaattggctttgacaataaaggtggcattttcatttctaattaaatattcatttaaatcgagtgcttgctcaatatcgtcttgcgctggtgatgggaaacccgcagcaacacgttctgtcgccaaaggaatgtggtaaattttatcgttgttcggatgaacctgctgtatctttagttttgaagtgaaatctgtctggttattggttttgacattattcagtaaccaatttttgataaagttgacttgagattcaggaacacgaatcactttggtgggttcattgaactgtgctttacggccggcgttttcccgtgcaccgccatgctcgaattctttcttctttggcatatcgcctccatttcaccgttcaaatcctacacaaacaatgtaacttgaaaaagttacattttcaagttgacgaaatattttttttgcataacaataaatttcatgatcagattttaatccattttgcttttaacagggatgttaaaacggaaatggtaatttgaagagaatcaaaacctattgtgaaatagttcttattactgactgttttgatttttatcaatgaaattctgaacacttaaatatgagttagattcagtttttggtatggagacatgcgaaatgaaaaatcaacgtgatgcagttttaggttatgcagatgaacaacatgcctactatatccgtcttattgaaaatgatgcggtattaggcgaaagctatggaattttctgtgaaaatccggaaagtgaagcagccgaaagtattatgacgacactatttttaaagaaatcattttggttaaatggctcagaattcacagatattgtaaaaggcttacatccccttacccactcataagtttaaaataataaaaataaaggaggcataatgcctcctttattctcaaaaactgtttgcttaagacgtaaagcgtccataagcatcgcgtttttgattacgagagttctgaccacgaccatctgaacggccacggcggtcatcatcgtcgtcatcgtcatcacgacggctgcgaccacggcctcggccacctgaacgaccacgatcatcatcttcatcgtcatcatcataacgactgcggccacggcctcgaccacctgaacgaccgcgatcatcatcttcatcgtcatcatcacgacggctgcggccacgacctcggccacctgaacggccacgttcatcatcttcatcgtcgtcatcataacgactgcggccacggcctcggccacctgaacgaccacgatcatcatcttcgtcatcatcgtcacgacggctgcggccacgacctcgaccgcctgaacggccacggtcatcatcttcatcgtcgtcatcataacggctgcgaccacgacctcggccacctgagcgaccgcgatcatcatcttcatcgtcgtcatcacgacggctgcgaccacggcctcggccacctgaacggccacgatcatcatcttcatcgtcgtcatcataacggctgcgaccacgacctcggccacctgaacggccacgatcatcatcttcatcgtcgtcatcacgacggctgcggccacgacctcgaccgcctgaacgaccgcgatcatcatcttcatcgtcgtcatcacggcggctgcgaccacgacctcggccacctgagcgaccgcgatcatcatcttcgtcgtcatcatcacgaccgcgaccacggccacgaccgcctgagcgaccgcgatcatcatcttcgtcgtcatcatcataacgactgcggccacggcctcgaccacttgaacggcctcggtcatcatcttcgtcgtcatcataacggctgcgaccacgaccattacgatcatcgtttttatgacttaaagcaccagcttcacgagcctcttctgaggtaaattcatgtgcgttaccactggcatgtgcagcacggccagcttcacgagcttcttctgaagtaaattcatgcgcattgccactggcatgtgcagctcgcccacctttactggctatttctctgactctttcaggatccatacttgcaaatccacgatttgaagtacctgaactattgttatcatcttcatatctagtattagccatagttatatcttcctatattaaaattataagtcgctaccgcttttattgaacggataaatttaagataagagatttaaaatatttttatacccatgctatgtttcaatctttttaaatgtatataatttaaatttcaaataaaaactccaacttcattatttaaataaatattttcttagttaaaatatttataaattattagctacttttactttttaaatactcaccatacttattattactcaaacctacataacaatatatttttacaaatacatttaaaaattcaggctaaataacacaaactttcataacatacaaatcaataaaaaacaaaaacatcttcactattgaagaaacaaacctaaaatataattaaaattatttaaaaacaataacataaaccattaattttgcataaaaactttacttgagtgattaaaatcaagatttaaaattaacatataatatttgtgagaaaagaatgatgcaacctactcatacacactcaacgctacaatatattcatatttctgtacctgaaattttactcagtaatattcaaataaaaaattcttggcaagattataaccaagaatggagctatagattagacccgcctcacgcaagccatccttttcagagagacttgtatattattaaatcaaaaaatattgaaacggaagatataaaaaaaatattagataatatagttgttaaaaacagtaaaaataaagatgacttaaaaaatatagtcgaagcggaaacagtaataaaagaaattttagatttatctaattatatacctatagaaaattggctaaatgatacaggtaatcgatcaattgttgaaagtatgattgataaaaacaaggttaaattattagatattatctaacctaacttgatatgttatatttttttacatccttatatataaaataacaaagacaactttttaaaaaagactatttactcatattcacgtgcaaattaaccaatatagagggactgaaaattaaatagaggtagtctagacatggaaaatacaacgaatcagtatccatcagaagttcctgcacaagttcaacctcatcaaccaggtgatcaggagaaaatgcatcctgaaccagaaattattaaagcatcccataaaggcagtgaaaaactaaaaggcaaagttgccgtcattagcggtggtgatagcggtataggccgttcagttgccgtactatttgcccgtgaaggtgccgatattgctgtactgtaccttaaagaagaccaagatgccgaaattactaaacagcttattgaaaaggaaggacaacaatgtcttttattaaaaggtgatatttccgatccagaccttgcaaaacaaaatattgataaggttttacagcattttggaaaaattaatattttagtgaataatgcgggtgtgcaatatcaacaaaaagaaattgaaagtattagtaatgaacaattagaaaaaacatttaaaacaaatatttttaccatgttttatttaaccaaagaagccattccttatatggaggaaggcgatagcattattaacaccaccagtattaccagttaccaaggtcatgatgagttgattgactatgcaagtactaaaggtgcaattacctcttttactcgtagtctatcgaacaatttaatgaagcagaaaaaaggtattcgtgtaaatggtgttgcaccaggcccaatctggactccccttattccaagtagtttcgatgccgagactgtcgaaaagtttggtaaagataccccaatgggtagaatgggtcagccaagtgaagtcgcccctgcttatcttttccttgcctcagatgatgcaagttatattactggtcaggttattcatgtaaatggtggtcaaattgttaatggctaataacataatttagaaaaagccctgaaagcgtttaaactttcagggcttttttttatttaagccggtacatgtgcggctatttgttctcgtgaccaaacacggtgtgctttaatcaggttcttaaatttttccgcaacatgctggaactcatcttcaattaaagttccttcatctgccactaaacctaatggttcaagcaaatcagatttattacccaaaaatacgattggctttaagtgcttataagcttcgagtaagtaatggcgagctaccccgtcttgcataaccgtatttaggttatcgccatccggaataattaccgcatcataggcaattgaaggctcagacatttgcatgccatcagccacaataacgttatctttatgatctttgactggagccaagctcggcgctagtaagtgaaggattacgccttctttaattgcccagtttttaatagcttctaatgcgtcagacttcaccatgttatggataagtacggcaacttttctaccttgaatatcttcaggtgggaaagctaaaaaagataacttggcagatttttcaactgctgttttcttataacttagggttaagtcaggcacttcaatacctaaatttgcccctacttggcgtgccaaatctaagtcgatattagccaaaatttgttgaacttgacgctcacgaatatgctttctttgaactttacttaattcaaaagtataggcatcgaccacatgtttttgttcatgcggtgcaaggcttttgtaataaagtcgtggttgagagaaataatcagagaacgtctcacttctttgacgaagtttatgcccactaattttttcaggataactttcaaaaccaccatttgatgccgctggcggtgtctctactggccaatttccatcaattgagtttggttgatatgcagcctgtcctttatgaatggtatgctgatgaataccatcacgttgattgttatggaatggacacacaggtttgttaatcggaatttggtgaaagtttggtccacctaaacggcttaactgggtatctgtgtatgaaaatagacgggcttgtaaaagtgggtcatcagtaaaatcaataccaggtactacatgacccggacagaaagctacctgctctgtttcagcaaagaagttatctacatttctatttaaaacaaatcggccaattggcgtaacaggaactaattcttcaggaataatttttgttgggtccagcaaatcgaagtcaaagttcatttcatcttcttcttcgacaatctgcacgccgagttcccattctggataaaaaccgtgctcaattgcttcataaagatcacgacggtggaaatccgggtctttacctgcaagtttttgagcttcatcccataccagcgcacttaaaccttgttttggtgtccagtgaaatttcacaaaatgtgatttaccttcagcattaattaaacggaacgtatgaacaccaaacccttggatcgaacgtaagttacgaggaatcgcacggtctgacattgcccaaattacagcatgtgctgactcgggcactaaagacacaaaatcccagaaagtatcatgcgcagttgcacccgttggaatttctgtgtccggttcaggttttaccgcatgtacaaagtctggaaatttaatcccgtcttgcacaaaaaagacaggtgcgttatttcctaccaagtcgaagttaccttcttgggtataaaacttaatggcaaaaccgcgaatatcacggacagtatcggctgaaccacgaggcccttggactgttgaaaaacgtacaaaaataggcgtctgaatagttgggtctgtcaagaatccagctttggttaaacgttcgtttccttcatatgcctgaaaataaccatgtgcccctacaccacgcgcatgcacaatacgctcaggtatacgctcatggtcaaagtgggtgattttttctcttaaaatgaaatcttccaataaagtcgagccacgaatacccgctcttaagctattttggttatccgctattttaaccccctgatttgtggttaaagcttcattagttgcatcatctctaactgtgtctaactgttcagttttctgggtagtattggctttatttgctgcatcggcaccagccatttcacttgttttattggttgatttagtattgtcgttcatgtccattacctatgtttttgaaagttaaacttggggttgaagtagaaaacgtttataaaactagtttttaaacgtacctaaataaggaaaaaggagttctacgtatttacgagtactccaaagaccaatacttttatgatgagaatctggggcaagaaacggagtaagtttgcaaatctttatggcaaggtcacttgattgttggacgcgctcttgtagtgcatcaagttcgccatccgagatataactaaatagatagtcctgaatacgctggctattctttagttctctgctgtatgccaagaagctagaagaatgatcactaccagcaatccagtcatgaataatttggcgctctacagggttaaacaccccaaacatttttccattttcttcattaatcattcgccagaatacgctctgttcagggtcggtattaaacttaatccatttgtgttcagttaaatgagtgattaaacctgcaatgtcatcgggatttgataaccattgattaatggtcttgcacccaaactgtctggtttcgttatggattaactgaccgacaagcgcctttcttttgaaaattctatggacaaagtcttcagtatttaaattttttataatgtttgaagaggacaccccatgattattaagggcaaaaccacgttttagcttggtcaagaagagttctttatctctatattgattataaatatcttcaataactttaatggctttataggcatgaccattgtcaatattgtcgatagtgatatgaagattaaagtatttagaatcaatacctagttcagcaagctcataattcgaaattaaaagatgcagtggtaactgctcatagcctaaattaaaacccacaatctctggaataaactcaggaggcgcataacccagagcaagctgcacaactgcttgatgataatactcgtcttctaaaagcagatcgaaactgtctagccctagactgcgtaaaaggtcatcatagatacagacatggtttgcttttggctcacctaacccaagctcttcgagataagtaataattaattcatgaaaaataggatcattccaataatgcactgagctatatagccatgcaccgtctacttttttggttggagatacctttattaaaaactcaaatgcctgagcgacgttcttaaaatactctctatcttgaccagattgtctacgatttaaatatgcctgaaattcctgacaattttttttattatcgttttcacaccatgccttaatcaaattgatatccgaaggaaaatctatttccttcatctctagtttatctatctctttaacaagaaaatctctagcctttttctctttctcaaagctagaaacatcaggatcaaggaaaaaaacaaacaattcataataattttgttgattatcttgtaataagtctaataatcgttttttcactacaacaggcattttcattctccgtttgtgagatatcaattaccatacgtcaccctaactataatcgagttttaagtttgttattttgcgttattaaaaaacagggtaaatacaataaatctaaaaaattcatagacatataaaataacgcaaaattacatttaaacttttagtattatttaagctgctgtttttatataaaatttgcaaatcttaatccaattttacattaacttcaccatcaaaattataaacattaaaaaaataacaaagcaaacaattaaatagttttataacattttaaaaacaattgtagggagaattaaaatgttcaataaatgttgcgaattattagcaaaggaaaaaattaaaattgcattttttgaaagtgcctctgcgggctaccttgcttatcgtttctctttaagtccttattcaggcgatattctgattggaagccttgtgagttacgaccttcgcgtaaaggaaaataccttgcatatttcagaagagcttattgaaaaatatactgcagaatcaatgcaagtaactgttgaaatgattaataaaggtaaagaacttttacatgctgacctgtatgttgcctgcacaggtcttttgaaaaaaggcggctctgaaacaccagaaaaacctgtaggtactttcttttactcaatatattataaaaataatttttataattttagacgtgttttaaggggtcctgcctttttaaaactaagaaagttgatttactatgttactcaagatataaaacttattatattagaagacaaaaggcgttaattttatataaaagttaacaaatatacatttagaaatatttattatctttcttaaatattatgtgctgaaatgtaattttttaaatgttcatattaataatgtttatgacttaaaattacatacattaaaaatcagcaagttatttaaaatttataaattttaagtttacagttaaatatagggtaacacccctaccctacacatttaaaatctacatgttttaataaccctatctgaagctctcagataaaacacatcgtcataattgatatgaggtattaaaaatgagcactactaataatcaagcaaatcaacgcaataatcagcagcaacaacaacagcaaaatgacaaccgtaatcaacagcaacacggtaaccaacagcaaaacgatcaacagcaacaaaataaccagcaacaacagcaaaatgataaccgcggccaacaacaaggatctaaccaaaaagattctggccaacaaaactcaaataacaaccaacaacgttaatcgtttgtagttgttctttgatgcggtcgatcatttaggaaggtgacctcaccttcctaaatcaaaatataagcataaaattcaataaaatatgagggaattctgatgacagatcaaaatacagatcatgctcaattggtagctggcgatcataactattctgactctcgctggcgcgaaagctatcttactcgaccttattatcaagaagcgcaattaactacaccagatctagattatgatcgtgatttttctgcagcttatgaacttggtcatcgagctcgttctgaatctaaagaaggaactcagtttgaagatatggaaggcagcttgcagcaaaaatgggaagagctaaaagctgagtcccgcctaaaatgggaacacgctaaacaagcgattaaagatgcgtgggatgatatttaacatcctcaaaaggtccatagctataagcttatttcctattggccctgggaaataggcttttttattgtcctaaaattatgagcattaaaaaaatggtggcatattaaaattatgactaagatattgatttgctaaatttggatcatcaaaaacttcttttttaaattgtacgctcggtgttgtagcgagtacatgtgtcggcttaatagtaacttccactacatacttattttgctcatacttggcttttacgccataaatctcagaatcattaatgcaagttccatctgtaaaatatacaaacatacgtactaccttaaatattactcatcatagcggtcttattaaaaataaagcctgactcagataatcaggtcaggcctttcatcaaaattaactttgatttttcttaaaatattcaattatttcttccccattatttacaggctttttctgcgaagggtaagtttcttcataggcataggcgggtaaagtaattttagctcgaattggaggtaatttttcttgtccacctgtggtaattcgctcaataaaaccagcaagccaaagtacaaactcctgagtatttttacttttaggaataagacttaaatccaatttaatttttgactcttgcaaaggtttaatgagtatttcggcaaaatcaatataattatataaaagctttaattttgtcccctttatttcttgtctgagttcaatcatcaaattattaagatcttccatcggatcatccgtaaagccttttttttctttaacattttgatatattttctcagctatttttaaatattggggcatatccttaccttttatagttcgctcttactaaaatgaattttggatgaatataagtaagctattgtgtttgttttattaactttttgaaacggtaacttaagattgcaacaaaacggtaacaacaaattctccaaattgtaaaaacaaaataaatatttgattaattttatatttttatatatttcattattattaaattatattttttatataaaataacgattaaaaaagcctactaataaagtaggcttttgaaagaagctaatctattacgagtttttattcatgtcatgagatgtagctggatcacttgcttcatgcatgccgtcatttcttgaattacgatcttggcaagcactcatacccatagcaattgccaacaccatacttactgcacaaaagattcttaccatttaaatcacctttataaatattaaaatgtaggtttatgaataacattatcttatgttggcctaccgcagtggttctcttaacttttgtagattatgcaagcttttgtaaaaaccaaaaattatgattaataaaattatatttcttgcaattgatattttggttattttttggcaagcagtgtttaggaggctcaggtcatgttataaaaatcgaattattaaatagtttagccaaacaacacacctaattagagatattgatatactatacaaataaacaattaataaatatttgatatataagattaaaaaataatagtgtgacttatattcaaattatttatattcatattatattttttaatttttctattttctaaataaaaacagtgaaatatttatatcaagttatataaatcaatcttttatttttgcaattgacccaccccaatgctcagcttatgatgctcgcgctgaccaattttgtcagtcggttttagcagaccgtctacctaagtgcactaaaaacacgttttttggtgtgacgcccctcgtgcctttgatggaggaacgggagtgggacacccttgggtgtgctggtttcttaggtatcagtctgctaaccctctttcgtttcgccaccataataatgagcaatgagtgggcataacttcttttaaccaaggagtcactcatgactattattctatattttttaaattcttttattaaacctacttacattcaacctcttttactcaagcagtcatttcttagagttctttctcatcctctgtttaaaagaactacacactatagagttcgaaaaatttttacttaatctttttgtgtacccatcttgatatacaagattgggggcagaagttttatgtattcaaaatcacataaagattaaaacttctatcaacatcacttaacgataacaacaacccatgaagagtaacaagaatgttttttctctatcgttttgttttggtgagccttctgacaataggtgttttaaatttgatggggtgcaggccaatgagtaaaaatgaatttaatacgcgttgtgtatgggccggacatgacctttcagcgtgtaattgtatttataattctttagagcagcattattcacctcaatttgtagaaagtttaccaaaattaagtttgcaaaatattgatgcaaaaatgaactttgtagaaaccatgaatcaaacgatgcagcagtgccaattgagtgcgagcaaacactaaactaatttatagaggcatgctctaccaaaaaatccaagaatgtacgtacgcgattaggaacatacttatcgtggccaatccagacagcatgaaattcttcagaagcatgaatattccaatcttcaagaattttgacgagttgtttttgctgtaacgcatttcgaatctggaattcatttagttgagcaataccggcacctgccagtgctaactgtaaaattgcttcgccatggtttacttttaaaactttagagggggttaggctgatttcctgagttgcttttttaaataaccaggttttgttctggcgctgataacttacatctaaaagctgatgttcatgtagttcatctggatgctcaggacaaccgtacttttcaatatatagaggagagcaaacatactgtttataagtactgccaagcgagcgggccaccagattggagcttttcaaaggtcctgttcgaatcgcaacatcaattctttgttcaaccaaattaattacttcatcactcaaatgagcttctaattcaatttccgggtaacgttgattaaacaaactaatgcatggcaataaaaagtgtatccaatatgaaaaactggtatggattctaattcgccctttcggtatatgatttgcggtaaccgattgttccagttcgtccaagtcattgagtatttgaatgccttgctcataaaactggcatccttcactggtaagctgaaactgacgtgttgaacgattgagtagcctgacacccaatcttttttctaaacgagaaattaacttgcttacggcagacggcgtcatgttacatgctcttgctaccgctgaaaaacttccaagctcgaccactcttataaaaattgccaactcgccagaacgattgatatcaaaataagacatagcaaaatttatttatgaattgtattcacaaatcttattccgcttagaccgctataacaaggcatcaatttgtttcaacatacctttaattcgttttaaagagttcttgagatgaaactttatcaagctaccctattttcttttgttttaattacgagctttgcacaagctgatgtagaaaacagccaatggattaccacttggtctgcgagccctcaaaaagtctggaataaagacttcgtttttccaacactcattccagagcaagtatctaatcagactattagacaaatgagtaaaattagtttgggcggtgaagcggttcggctcgtttttaccaatcaatatggtaaacagccactttatattgatgaaacaacgattggtttagcgaacgcagcaactctaaaatctaagagcatctatcccgtttatttttctggtcaacttaaagcaagaattttacccggcaaacaactcataagtgatccaattcagttgcctgtacccgatcatactcaattggtggtgaatagctttattcaaaagcctacaacgtttaaaacatttcattgggatgccaaacaaaccagttggctgattagaggaaatcagacaacaaatttaactacaccaatcgatgccaaaacaacgacggcacggttattactgtctgcaatagaggtaaaacccaaacaaaaggctcatgtagttgcagttgttggagactcaattaccgatggggcgactgcaaccttagatgcaaatacaagatggaccgattttttagcgaaacgtttatctgtacatcgtatggccgtagttaataatggcatttcaggaaatcgattacttaccgatggtatgggtgatagcgttttaaaacgtttaaacagtgagatatttcaatattcaggcgttaaaactttaattgttttggttggtatcaatgacatttcatggcccggtacagcttttgcacctaaacagcaaataccctcttttgaggcgctcactcaaggttatcgacgtgttgtaagtgaggcccataaacataatattcaggtgattggtacaaccttacttccgttctctggtgctttgcctaatacccctttagataattattatcaacccaacaaagatcaattacgtcagcgcattaaccactggataagaactagccatacctttgatggtgtgcttgatcttgatgaaggcttaaaagatccaaaacatcccaatcgattaaatccaatttatgattctggagatcatttacatcctaatgatcgcggcaatcagcatatggcagaattggtagatttagatcaaattattaaaaattaatcattcccccatcaggtgaaatcttcacatgatggggctgcttatttaaaaatcataactcgctatcatgttgaagcggttatcaatcccgttacgattatcaaatgtttctcgttccccataaacatattcgatacccaaagtaatcggcttatacgggttataaagtgcattcacccaaccttgccaaagctgtttgttttgggtggtactagtacgctgtaattcggcaaaacggttatcatctttagccttcatatagccatagcctaaagtcgagcgaatttgcggtgtaaattgatgagtgatacccaaagaaaccgtgtcaaattcattgctatgcatattattttgatcatctattgcatagccactgttactccatagcaagaaacgtccatcacccttaacatggtaataatcggctttaagtaatgtatcaggggtaatttgatatttaccgcccaagcctaccccccacgcccactcgctatcattgttagttcttttttctgcaacaaaactacggcctgaaagcattgaaccattggcaaatttatgatttaaacgccccactaaagcgggtaaacgcattttattatctggatctgttgccgcagtatatttcgggtcttcaactgatactgcaaaacttgtatttgccgttaagttatcgctatagcgaacaagcggtgatcttaataatgcactacctacaaatgtacctgcatcaatcgtttctgggtaatattcaggggcaataaatgtcgaccatgtttgaccaataagccatttatcaaaagttaaataggcatgacgtatccgaaactgatcacgtgtagccgccccaaaaaagtccatttctaactttccgcctacgtcaccaacggctgtaggggttttaaaattcaatccaaagcgtgtcacatacacagtactgtgcaactggtctttctgggcagattcttctggcgtattttcaagaggaacgccgctaatattgttatacatgctagatgcacccttaatttgataagaagcatctgctcgtatataaccgtataagttaaattccgcaccagatttagttaatgtttgctgtataggtggtggagcttgagtaactacaggagcagcttgttctactcttctttgagctaaagatttttgagcctccatattaatttgtagcatagctcgtagttcttttatttcttggcgaagttgctctatttctgggtttacttggcctgcaaaagcagaagacataagcagagtcacagaaactgccaacaagcttttttgaaccgttgtatttaaaattttcatcatgaaattttcctttagacctttaagtagtcttaaaagtctcgacatcctttttgttatgtacctatctaaaatagatccttgaaaatttgcctttctttcacaagaaagacgttccctcatattttttagatccaccctccctagtgcagcaaaagcaactttttaattttccattttttatattctcttccagattgagaatattcggttttaaacccttatttatattccccaatagtattatttttttgcaataatcccttgataagtcaaaatttgcgtatatggctgtacgctttcaaagcctgtctcttccaaaagttttatatatccttcagtcgttaaactaaaaaagtcctccgccatacgctccaacattttttgacattgttcttctgttaacccttgagccaaacacaaataatgtaatgcttgaagctgctgtggatttacacaagtcatgaggtcataggtaagtaaaggcgccttttcttttaagcgcttataaatatccttaaagaaggctggttttatgtcatctgcaataaaatgagccacgagaatagaaagtgcagcatcaaagcaactctcgagaggtaaagctgaagtttcaccgtgaacaaaagtgacttgggtagatttacctaaaatctccacctgctcctgagctttttgcagcatggttaaagatggatcaaccgctgtaaattgccagtttggatgtcttttaagtaaataatcgagttcgtaacccgtaccacagcccacaattaagatatgagcatctggtggcaacaccgactgcaaaatggcatccacctgttggtggatcacttcatagcccggaattaatttacgaatatgcacatcatatccttcgactactttagggctattaaagtcttttgccattttgcgtgtcctctattgaaaccgtatttcgattttcctttgctgcactttgaccgagcttttgacttatttagtcaaagacatttcccgttaaattaagttcagctcgcataatttcctgcaatttaaacttttgggctttgccagaagcagtcattggaaactcattaaagaatcggacataacgcggcactttgttgtgtgaaatgtgttctttgcaaaattggcggatgctgtcttcatcgacttggtgatgctcatgcagaataatgcatgcacaaagttcttcaccatatttcgcatctggcaagccaatcacctgtacatcgcttacgtctggatgagtatataaaaagtcttcaatctcttttggaaagaggttttccccaccacggatcacgacatctttaatacggcctttaattttaataaaaccgtcttgatccatctcggcaatgtcacccgtatgcatccagccagccgcgtcaatcacttcacgggtcttttcctcttcaccccaataaccagccatcactgaataaccacggacgcatagctcccctaaagtcccttgcggaacaatttgcccttctagatcaacaattttaatttcaacatgcggatgaacatgcccaactgtgcttactcgcttatcaatcgaatcgtttaccgagctttgtacactcactggcgaggtttcggtcatgccataacaaatggtgatttcagacatatgcattcggtctataacacgttgcataatttcacgtggacaaggactacctgccataatgcctgttcttaagctcgacagatcaaaatcattaaactgttcatgctctaaggttgcaataaacatggttggtacgccataagctgccgtacaacgttcttgatgaatcgcttttaaagtttccaaaggattaaatacagccgatggatagaccatggttgccccatgcgtcacacacgccagattccccatcaccatgccaaaacaatggaacaatggcacagaaatacagactttatcttggggggttaaacgaatgccttcaccgacaaaataaccattatttaaaatattatgatgggttaacatggtccctttcgggttacctgttgtacctgaggtaaattggatattaatagtttcatcaaactggagctgtctggctaattgttttaattgttctagctgttcagaagttggtgtagttagtaaatcactaaaacgataaataccggtatgttgttgatcatcaattttaatgacaaattttaaatgtggcagtcgttctgaactgagcactttatctgtacaggtggttaactcaggagcaatttttgtgagtaattcttgataatccgtcgttttaaattgagaagcaataatcaatcctttgcatgagaccttattcaacacatattcaagctcatgacttttataagctgtatttagattgactaaaataatccctgctttaaaagctgcaaactgcgtgatggtccattccacacagttaggtgaccaaatcgctaatcggtctcctttttttaatcccaattttaataggctacaagcaaaagcgtttacttcatcctgtaaagctttataggttaatcgtctgttttgatgaaaactgacaatcgcttccttttcagcatattgctgacaggcctgatcaaattgttcaccaatggtcatacccaataagggttgtgtacttggtcccgaggcgtagcttaaccgttcttgttgcattgaatcattctccttgattctttgtaattctcttcttacctgatctaattgttgttactgcaactacttttccaaactacttattttgtgttgttttatcctttatatgccctattttttctgcacagcatccacacaaaagtcagcaatctgttttgaaaaatagtctttatgcgcatgatcaaactttgtattttgagctgggtctaggggttcaaccaccacataagtcatagcaccgactacacaaagtgctgctgtgtttaaatcatccaagataaactcaccacttgcatttccatccgcaagtatttttttaatactttgtttaatcaattgcttcacacgaaaacgctcatgttcaaccgttgaatcgacgggttcaaacatgagtgaatatgcaagctgaggactattcagtgcccgtttcacaaaggttgccaccgccttgtgtaatttctgctttgccgataagtcactttcggtaatcgattcaatcaccaatagttctgtattaatggcatcagacaaaacttctattagcacttggcttttattatcgaagtagcgataaaccagtccactagatacacccgcttgctctgcaattgtttgtatttgtgcgtctttgaaccctccctctgaaattatttttctggctgaactcaaaatcgattttcgattttgctccatccgctcttgcattaaagatgatcgtttatagctcataatttattctctaacaaataaaatgaattgtaaatcattttatgaatctgtattcactttttcaaaaaatcattgtatggtaattatcaaatacccacaaaatattttatggacaacaaatataaccaataggatgaaaatatcatgaacctacgcagcttgaatttcggtctagatgaaactttaattgcgcttcaagattcggtagccgcattttgtgcaaaggaaattgcaccaattgcccaacaagttgatcaagacaacaaattccctgcacatctctggaaaaaattcggagatatgggccttttaggtatgacggtttctgaagaatatggcggtgccaatatgggttatttagctcatattattgccatgcaagaaatttcccgtgcttcggcagccattggcctttcttatggtgctcattctaatttatgtgtaaaccaaattaaccgtaacggtaacgagcagcaaaaacaaaagtatttaccaaaattaatttccggtgaatatgttggtgcccttgccatgtctgagccaaatgccggttccgatgtcgtcagcatgaaattacgcgccgagcaaaaaggtgatcactttgttttaaacggttcaaaaatgtggattaccaacggcggcgatgcagatgtgctggtcgtttacgctaaaactgatccacaagctggcccgaaaggcatgaccgcattcttgattgaaaaaggcatgaaaggctttagtcacggcaaccacttagacaaactcggtatgcgcggctctaacacttaccccctattctttgacaatgtagaagtccctgctgaaaacgtacttggtggtgtgggtaacggggttaaagtactcatgagtggtttggactatgaacgagcagttttaagtgccggacctttaggcattatggatgcttgtttagatgtcgttattccttacttacatcaacgtgaacagtttggtcaggctttaggtgaattccagcttatgcaaggcaaacttgccgatatgtattcaacatggttggcatgtaaagctctcgtttatgctgttggtgctgcatgtgacaaagcggatcatgaccgcagcctacgcaaagatgccgcaagtgccattttatatgctgctgaaaaagcaacatggatggcgggtgaagcaattcaaactttaggtggcaacggttatatcaatgaattccctgctggccgtttatggcgtgatgcaaaactttatgaaattggtgcgggaacttctgaaattcgccgtatgttgattggccgcgaactcttcaatgaaaccaaataataattataaataaggacgtatcttatgaaccaattacaaagcaagattaatgttcgaagcgaagacttcaaaacaaaccagcaagctatgcaaacattggtcacagatctcaaacaagttgcccagcgtattgctttaggcggtggtgaaaatgcccgtcaaaaacatttggctcgaggtaagcttttaccccgtgaacgtattgatcaactgattgatgtcggcacggcatttttagaaattggtcagttggcagcgtacaacgtttatgaagatgatgttcctgccgcgggtgtgattgctggtattggtcaggtcaacggcatcacttgcatgattgttgccaacgatgcaacggttaaaggtggaacgtattatcccctaacggttaaaaagcatttacgcgcacaagaaattgccgaacaaaatcatttgccttgtatttatttagtggattcaggcggtgcctatttaccaatgcaagatgaggttttcccagaccgcgatcacttcgggcgtattttctataatcaggcacgcatgtcgagcctaggtattgctcaaattgccgtggtaatgggtagctgtaccgcaggtggtgcttatgtaccagcgatgtctgatgaaaccattattgtacgtaatcaaggtacgattttcttaggtggacctcctttggtaaaagctgcaactggcgaagtggtgagcagtgaagatttaggtggtggtgatgttcacacacgtctttcaggtgtggctgaccatttagctgaaaatgatgaacatgcaattgcgattgcgcgaaacattgttgccaacttaaataaaaagccaaatgagttaaataagcaaattgatgaaccattatttgatgcatcggaactctatggcgtggtgccaagtgatgcgcgtaaacctttcgatgtgcgtgaagtcattgcacgtattgtagacggctctcgttttgacgagtttaaagcccgctttggctcaacacttgtaacgggtttcgcttctctctacggcatgccagtcggcattattgccaataacggaattttattttccgagtctgctcaaaaaggcgcgcactttattgagctatgcacacagcgcaatattccattgttatttatacaaaacatcaccggctttatggttggtcgccagtatgaaaatgaagggattgccaaacacggcgctaaactggtgatggcagttgccactgcaaatgtacctaaactcaccctgattattggtggttcatttggtgcaggtaactacggtatgtgtggccgtgcttattcaccacgctttttatggacatggccgaactctcgtatttcagtgatgggcggcgaacaagcagcgagcgtactttcgactttaaaacgagatcaaattgagcaaaaaggtgcccagtggtcagcgcaagaagaagacgaatttaaacaaccaattcgtgaacaatacgagcgtcaaggccatccatactatgcttctgcccgcctttgggacgacggtgtaattgatccagctcaaactcgtcaggtacttggtttaagccttgctgcggccatgaacgccccaatccagccaaccaaatttggcgtgttccgcatgtaagaggtgtatatgagctatcaatttttacaactcgaacaacaaggtcaggttgcctatgtttggctgaaccgccctgaattgcacaatgcttttaatacgacagtcattgaagaactacatgcttgctttaagcaaattaatacacgtgatgacattcgtgttgtggttttagctggtcgcggtaaaagcttttcggcaggtgccgacctcaactggatgaaacaggcaggtcaggcatcttcagcagaaaatgaagcagatgcattaaaacttgcgcaaatgcttgatgcacttgcaacacttaaacaaccgactattgcccgcgtgcatggcattgcctttggcggcggtatgggcttagcgtcggcatgtgatatttgcatttccagcacggatgccaagtttgcaacctctgaagttcgtttaggtcttgctccatctaccattagtccttatgtgattcgtgcgattggtgcaagacaagcctctcgttacttcttaactgccgagcggatttcagctcgtgaagccaaacaaattggtttagcacacgaagtagcagatgctgaagacttagataaaaaagttcaagaaattgttgatgctctattactcggtggcccgcacgctcaagcggcttcaaaacaactcattcaaatggtgagcaaccagaccatgagcaatgacttgctgcaacagacagcacatcatattgctcaagttcgtcaaggcagtgaggcaaaagaaggtctaagtgcctttttaaataaacaacagcctgcttgggtttctaactcgaataacaacaattaaggacgatcatcatgtttgaaaagattttaattgcgaaccgtggcgagattgcctgccgcgtaattcgtacagctaaaaaattaggtattagaacggttgccgtttactcagatgcagacgcaaatgcacaacacgtcaaacttgcagatgaagcggtttatattggtcagtcccctgcaacacaaagttatttacaggttgatcgtattattcaagctgccattgatacaggcagccaagcggttcatccgggttacggcttcctttctgaaaatgatcagtttgcactcgcttgccaacaacacaacatttgctttattggcccgccagtggatgccattttagcgatgggcttaaaagcgacctcgaaagctttaatggaaaaagcaggtgtccctttaacaccgggctatcacggaaccaaccaagatgctgactttttaaagcaacaggcagaccgaattggctatcctgttttaattaaagccagtgctggcggcggtggtaaaggcatgagtctggttgaacgcagtgaagattttctgcatgctttagcctcttgtaaacgtgaagccaaatccagctttggtaatgatgatgtcttgattgagcgttatgtgattcaaccgcgccatattgaagtgcaagtgtttggcgatacacatggcaactatgtacatttgtttgaacgcgactgttctgtacaacgccgtcaccaaaaagtgttagaagaagcccctgctccacaaatgccaagcgagaagctcgatgcaatgcgccaagcggcaattgatgctgcacgcgcggtaaattatgtgggcgcaggtacggttgagtttattgtagaacaagacggtacggcgtatttcatggaaatgaatacccgtctgcaagtcgagcaccctgttactgaaatgattacaggtgaagacttggtcgagtggcaacttcgcgtcgcttatggcgaacctttacctaaactacaaaacgaattaaaaattcatggacacgcgcttgaagcacgtatttacgccgaagaaccagaaaaaggctttttacccgcaattggtaaaattgactatctgcactacccaacccaaaaccaatatgtgcgtgtagatagcggtattgttgaaggcgatgaaatcacgacctattacgaccctatgattgccaaattgattgtatggggtaaaaaccgtgaagctgcgcttattcaaatgcaaaatgctttaagtcaattccatgtcgatggtttaggcaacaatattgcctttctggaaaagattgttcgtagcgaatcgtttaaacaagccaagcttgataccaacctgattcaacgtgaacaaaacttcttgtttagccctgaagagatcaaaccggaactggtggtagcagcagcatttattgagtttttaagcaagcttaataacaacagttcaagccaaaaacagctttggcaggctcaaccgctttggcgtttaaatattgcctatcagcacagtattaaactgaactatttaaaccaaaatattcaaattaaatttgcctcaaatgaagatggcttcaccgcagaatataatgggcaaagctacccaatttcaggtcaattgcttgatgcacatactgcctctgttcaaattggtgaggctcagcaaaagctaccttttaaccaaagtcagcaaggccttaccttgttccaaaatggtcaaagctataagtttgcttatatccgccaagactttaatcaggcagatagccaagccgatgaaggtcatttaaaagccccaatgccgggtgtggtcactcaagtgctagtcagtgcaaatcatagcgtgaagaaagacgatattttaatgacgcttgaagccatgaaaatggaatataccatccgcgcccctaaagatggcgtgattgtagactcctatttccaagtcggtgatcaggtcaaagctggcgatgagcttgtggaatttcagcctgctcaggaggaagttgcatgagtgagtttgtcaaaatcgtggaggtcggtcccagagacggcctccaaaatgaaaagcaggctttaactgtcgaacaacgcttaaactttattaacgatctaatcagtgcgggcctaaaatccattgaagtcggttcatgcgtttcggcaaaatgggtaccgcaaatggcccaaagtgacgagctatttaagttattaccccaaacaaccgatgtgcaatttagcctgctcacccccaatatcaaaggttttgaaactgctcaagcggtaggatgcaaagaggttgcggtgtttaccgcagcttctgaaagttttacccgtaaaaatatcaactgttcaatcgacgaaagctttgaaaagtttagcgatgtcatgaacgcagcaaaagcacataacatccgtgtacgcggttatgtctcttgtattgtcgattgtccctatgaaggcgcaattgcacctgagcaagtggtgaaagtggttaaacggctctatgacatgggctgctatgaagtgtctttaggtgaaaccattggcaccgcaacaccagatcgtgttcaaaaggtatggcaagcctgccttgctgaactcgacagcaaggtattagctgggcatttccacaacacctatggcatggcaattgccaatatttatcagtctttacagcaaggtattcgtgtttttgattcgtctcttgcaggacttggaggttgcccttatgccaaaggcgcctctggcaatgtatcaaccgaagatttgttttatttgctgtcacacatgggttttgaaactggcattaatttagagaagctgatgcaagccagccaaaatattagcaatgtattaaaccgaaaaagcttgtcgaattatgcaaatgcgtattggcaaaccaagtgtgcatagtcataaattaaaatagttcagcatctggtataaagctaaatattaggccaagtaccagatcatcctatctcatctttatctcattctgttcaggaattgggattcaatccctcatgcaatttttttagaatctattatttatttctgtattaaatgcctctttaaaaagaagcattttctaccctatttttattctaatccgtattattcttcatcctttttcaattgtaatccttaaaaaatttatctccttatttataaaaataagatgcatccatttcaatttttggagaaatatattcttctacccaatccaaccatgcgcgtgttttggcatcaataaaatggcgtgaaggcaataaggtataaaccccaatatcaggcgaacgccactcaggcaagatatgacataatcttccattttgaaccgcgtctaaagccgaaaacattggcaataacgcgacccccatatcttgttgcaccacatctaacaataactcagggttatctgcaatgagttgccccccaatgtcgatttgataagattcaccattggcatttaacaaatgccaatctggtgtaatagacgggtttaccaagcgtaaacaggcatgattttttaagtcttctggagacttaggaacaccatgtttttctagatacgcaggtgaagcacataaaacagaaaaaatagtgccaattctgcgtgcaacaaaacgagagtctgttaatgattcagtgagataaagactgacatccaccccttttgctaacaggtctggaacgtattgtgaggtcgtatattccacggttaattcgggataatgcttacaaaactcggccatgacagggaaaacataatgatgcccaaagcttcccatacttaatacacgtaaacgacctttaggtttagaggccgttccggtgacttctgcctctgcttcatccaccattgaaataacttgccgacaacgctctgcataagttgcaccaatatcagtcagtgcctgctggcgcgttgagcgttgtattaattttgtacctaagcgtgtttctagctcgctgataagacgtgaaacctgtgctgtggtcagatccatctgctcagctgctgctgtgaaactcccgctatcaatcactttcaggaatgcatgcattgcatgcaaaagtccaccatcgagatttttgcgcataacgtaaatatcttttcctaaattacggattgttgcaccagtttagatcaaccacaatgactaaatgtacatacattggcactaattcttttttaagaagaggaaccgatcttttttatttcgtatgtcacttgctccaaatattcaactggatgttgaaaaaagaaagtagtccgagctactaaaaattctaaggagatataaatgaatatagctacaaaagtcactccaaatattattgcaacaaaggatgtgtcacttgaagataaatatgtaagtgataacggtacagcatttatgaccggcattcaggcacttgttcgcttgcctcttgcccaaactcgccgtgacgcgatcaatggttatcatactgctggttttatttctggttatcgtggttcccctattggtaactatgataatttcctttggcaagttgaaggattacttaaatcccataatgtcgtatttcaacctggtgtaaacgaagacttggctgctaccgcaatctggggtacacaacaagcaaatctttcaggtcaaggcaaatatgatggagtgtcttcatggtggtatggtaaaggcccgggtgttgaccgttcaggcgatgtactccgccatgctaacttagctggtacctctgaacgtggtggtgtcgttgctttattcggtgatgaccactcatgtaaatcttctacagttccccaccagtctgaacatgtcatgattggttgtggtattccaattttctacccaacatccgttcaacaaattttagactttggtgttcacgccatcgcagtttcacgtttttctggtctttggacttccatgaagctagtcagtgaaattgtagaaacttccgcttcagttcatgtcgacttagaccgtgtcactcctgttataccagaagatgttaatttcccagagggtggcgttaacattcgttggccagatcatggcatccaacaagaagaacgtctttataaatatcgcttaccagctgttttggcctatgctcgtgcgaataaaatcaataccgtaacatggccttgtgaaaatgcccgtattggtattgctgcaagtggtaaaggttatttagataccattgaagccctacgtattttaggaattgaagatgaaacagcccaacagcttgggctacgtgtttatcaagttggtctaatctggcctttagaaccacaaggtattcgtgaattcgccaaaggtttagaagagttgatcgttattgaagaaaaacgtccaattcttgaaacacaaattaaagatgagctttactcacttcctgatgaccaacgtcctcgtgtcattggtaaagcaactgacggcaaaggtgaatggagtacctctattgaagaagcaccactcattggtcactatgagtaccagcctgaaccgattgcaaaaatgctggctgctcgcttcttaaaactagatattccagaaagcttaaaattacaaattcaaggcagaatcgacttactgctaaaagcagagcaagaatcaaaacgtgttattgaccttgctgaacgtaaaccttatttctgcagtggttgcccacataactcatcaacagtcgttcctgaaggtagccgtgcattaggtggtattggttgccactatattgccgtttcgcttgaccgtggcacggaaacattctctcaaatgggtggtgaaggtgtaagctgggtcggtgcatcaccttttaccaatgaaaaacacatttttgctaaccttggtgatgggacttacttccactcaggttacttggcaattcgtcagtctattgccgcaaaaaccaatatcacctataaaatcctctacaacgacgcagtcgctatgacaggcggtcagcatgtagatggtcatttgagtgttgcacaattaactcgtcagctcgatgccgaaggtattaaaaaacaagtcattgtgactgatgaaatcaaactgttaaatgaagaagacggtattgcgccaggtgtagaaattcgccaccgtaatgaacttgacgcagttcaacgtgagctgcgtgaaatttcaggtgtaactgctttaatttatgtacaaacctgtgccagtgaaaaacgccgtcgtcgtaaacgtgatgcttaccctgacccagctgaacgtttattcattaataccgatatttgcgaaggctgtggcgactgttctaaaaaatcaaactgtttatctattgagccagtagaaacagctttaggcactaaacgtcaaattaaccaaagtagctgtaataaggacttcacttgtgctgaagggttctgcccaagctttgtgactgttcatacacgtgatatgaaacgtcctgctaaatttgaaggtattagcgcaggatggccaacatctccaatcattcctcagttatatgatgttccaagtcgtattatggtcggcggtattggtggtacgggtgttgtgactattggtgcacttcttggtatggcagctcacctagaaggcaaagcaacacgtgttatggatatggcaggtcttgcgcaaaaaggtggtacggtttattcatacgtacaacttgcagcaagtgatgagcaaatttcttcaaccaaaattccagcaggtcaatgtgaattactcattggtgcagatgcggtagttgctggcagtggtgcagccctttcacgcttaaaagaagatgctctagtcattgtgaatgaagacagcactcctacttctgagtttattaaatctcgtgactggtatgcgcctattaccgatttaattgatcgtcttcgtggtcgtgttcgtcaaggtcaattggtttctctaccagcggctcgcattgccacactactcttaggtgattcaatttataccaaccagttattactcggtatggcatggcaatctggtcgcattccgctattacgtgaaagcattgaaaaagcaattcgcctaaatggtacggctgttgaaaagaacatcgaagctttccgcgtgggttgtcatcttgcaagtgacccgactttagctgctcgtttacttgcagcaatgccaaaaaccaaaactccgcaaactttggctgaacttgttgaagaccgttctgctcgtctaaccgactactggaatgaagcttatgcagctaaataccgcacacttgtagaattggcagctaaaaagttaccagaagagttaacaggtacgattgcaactcagctttatagagttatggcttataaagatgaatatgaagttgcacgtctactaacaggtaaaagcttcaaagaatcgatcgaaacccaattcggtaaaggcttacgtttaacgtatcatcttgctccgccagcgttacttggtggcctgaaaaatgtccgtaaacgtgcgtttggttactggatgcgcttcccaatgatgatgcttgctcgcttacaatggcttcgtgaaactttccttgacccatttgcacgtcaagaagaacgtcaacacgaacaagcttggcgtgaccgttatatcgcatttgttgaagcacttgttgaagcaccagacaatcataacttggcagttgctgaacaaattgcaaaattaccggcagaagttcgtggttatgggcatatcaaaatgaaagcaatggacgctgcaaaacaacgttgggatgaacttaccccaacactgctaaaagtccgtaactaaaaattaaatctcaaaataaaaaagtcatccttagggatgacttttttattggctcaaaaatttatttagtcattttacgtaaagtcaaaatctgctcgcttcgtccaaatgggccatatacatcatgtaaaactgcactggttaaaccaatgccatccgaaccatattgctgaacggtttccaaacctagccatttcccttgcggataacggtgcatgtggatttgtaaatcaagatttgggaagccccaagtaaattctccttcttgtcttgggacaatgccgtttgccgcatctaccatgccaactaaatgcgcaaaatctgtggtcggctgcccttcaaccatttctttgtcattgtttagccaaacaatgcctttgcccgcgcgatgctgatcattagttttagtgactaatgtctggataaaaccacccggccatcttttcatgcccgaccattcagtaaaggtatcgggatgatgaattggttgatcttcaagccccgcaatctcggaactgtcttgagtacacatgcgccatgccctagccacaatacaagttttaccttgtgcttgtagttctgcttcaatcaattcaatcgttttaccggcacgaatcacatgggtcttaatcgtaaattcaccaaatgcaattaatccaaaaatatcaaaactaattcggccaattcgcatatcttgtcgcggtgaaaactgttctaactctactgcgatgacaccacttgcaggcgccatatgctgttcatgagggttccaagcaccttgcgcatgaacagttgagcaataatgagcaatcacttcaccttgaggaccaattgttctattcagtaattgataataagcattcatgattttctttccttagtccttatacaacttcaatatttgatgaaaattcacgttttaatgcttatgttaaccctctatttcattggctcaactggtttttcctaccaaaaactgatgagtctaaaattacaaatttaatcactaggtaaaatttcgcatgtcaatttcacccagtgattctagaacttatcattcactaaaatgcaaaagcatcttgatcgagctccatcacagattcagctccagactcaatagaagcggcatggctctgtgtacgatgcaaaagcttttgatagaaaaacttagctgtcgttaattttgctttataaaaatcttcctcttgtgtacccgattctaatttttcatgggcaacttgtgccattcgagcccacaaatacgcgaacacaacgtaacttgaaaaataaagataatctactgaagcggctcctatttcttcagggttgtgcttggctttctctgcaatcgatttggtcagtgacagccattgctgcttaagctcagctaatttttctagataaggtttcagcacttcattggattggtgctggctaataaactgatcaattaaatcagtcatgttctttaaaagtttaccttccgacttgaggactttacgtgccagcagatctagagactggatttcggtcgttccctcatacaatgtcgagatacgtgcatcacgtacaatttgctccataccatgctcaacaataaagccgtggccgccaaatacttgaacgccatgctttgcagactcattacccgactctgttaaaaaggccttagcaatgggtgttaaaaaagccagtaattcatcggagtgtttttgctgttcctgatcgtttgaactttcgacaatatcgacatgctgagccagaaaataagccagcgcacgaccaccttcagaaaaagctttttgtgtcattaacattgaacgtacagcgggatgcacaataattggatcggcatttttgtcaggatatttaggaccagataacgaacgcatagcgaggcgctctttggcataacttaatgcgccttgaaatgaaatttcagaagcagcaagcccttgtactgccgttccaatacgtgcggtattcataaaggtaaacatacaattaagcccgcgattttccggaccaattaagtaaccttttgcgccatcaaaattaagtacacaggtggcattgccatgaatccccattttatgttcaatcgcgctacagacgactttattacggtccagcacctgaccgtcgtcactcacattaaatttaggcacaataaatagagaaatacctttagtccctgcaggtgcttgaggtaaacgggctaaaacaatatgaataatattttcagaaagatcatgctcacccgccgagataaaaatcttttcgcctgtaattgagtaactaccgtccggatttggttcggctttagttctaattaatccaagatccgagcctgcatgggattcggttaaacacatcgttccggtccaagccccactaatgagtttagtcaaaaacttttgtttttgttgctcggtcccatgatgctcaattgttctcattgcgccatgagacaatcccggatacattgcccaagcccaattagaaccacataacatttcagaaatcgcaatccgcagcaatgtcggcaagccttgcccaccatattctggatcggccgttagcgaggtaaaacctagctcggcatatttttggtaggcttctttaaaccctttcggggttgtgactacaccttgatttaaatgacagccttcctgatcaccattttggttaatcggcgccaactcattttcacaaaaatctgctgctgcttctaaatattgatcaattaattctcgatttacgctttcctgatattttcttaaaccttgatagttttgttctgtttgaagcatttcatgcagtacaaattgcatatcacgtaatggagctttgtataaaggcatcgttttttcctttcacttcactgcctgtgtcatgggcagatatcgtttttccttaaaatggacttttattgtttcaatctcaccaaaatatcaaaaaatttcttatagcaaaatatattttcactaatttaataaaattatcctaacttagttatagagataaaatataaacatatgtttttaaatacaaatataagataaaaattaattagtcttgtttaactagaataaatttttattttgtattgcaaaattttattccgtaaaaaatcaatttatagtatggtgattagactgcttaatcatgcaaggacgatttatggaaagcccgaaatacacaggtcttgagtttttaaccgctttaaaaaatggtgaagtttctccatcacctatggctcacaccataccgatggaactcattgaagtttccgaaggtaaagcaacttataaagttactcctcgcaaagaacatagaaatatacaaggcggtgtacacggcggcttttgtgccacagctttagatacggcgacaggcagtgcggcccataccctacttgaacatggtgttggctatggaaccattgatttaaatgtaaaaatgatccgccccatgcaggttgatacgtcttactatgcgacggccgagttgatcaatgcgggccgcaatattattagtacccaaggtaaaatcgtagatgagaacggcaaagtgtatgcttttgcttcggcaaccttaatgattattcgcaaataataaaatatctaagctcctatttatggagctttttcttgctttgcaattttgttcatttcataaaaatctaagcgatcaatcaagaaacttaacattgctaaccctagccctaagattgcacatgcttcccatccccagtgtttccaagcatacaccgcaataaaagaacctaaggcggctccgccaaaatataaggtcatataaattgaattaatacgggaacgtgcctcggccgaaattcgatagaccaaattttggttaagcacatgaaatgctgacaaaccgaagtacgccataatcacaccaacagcgtaggcaaccagagactgctgagcaaaaaataggggtatccatgcactcattaataaccccatgcaaatcactgcaattttattttcaagacctgctgcaattttcttacctgcccaaggagtcgcaaatacgccagccaagcccacaattccaaataaaccaatttggaaatcgttaaagtgataaggctcattcgccaaaataaaagtcatggtagtaaaaataagagccaaaataccaaagccaattccccctgccaaaccacggcgtagtaaatgaggctgatgaacagctaatgaaaatagtgaaccataaatctgtagaatattaagttggtgagacttacgcgcaactggtaactttacccacattacccaagcaaacaccaaaatgacaattccgctaattaaataaaccgcatgccaagaccaaactgtagaaagtaagcctgcaatagagcgcgctaataatattcccaagaacaaaccactcatgagagtgcctacaacttgagggctttttttcgggcttgctaaacctgcggcaaaaggaaccaaaacttgagtcgcaatcgaaaagaatgtcgctaaaaaggtaaagccatataaagctggcaaggtttgacttaaggatagccctacttgtgcaaaccccgtacagcacatgagcaagcaaatataactgcgcttttcaaaaaagtcgcctaggggaaccaatataaaaagaccaactgcataggacagttggctaatcacaatagttaaagcaacttgatcggcattaacttttaatgcttcagcaatcgaatagattaagggctggttataatagtttgaacccgcacaaattccacatgtcattgccatgataaaaataaagctttttgacagtatattttctgcattgggctcaactattttttccatttttaactacgccctattttaaaatttatacatcgaaacaaagtttacacgtgatacatcagcggttctgccatcaaacacttctcgtttgccttgatgatattccataccaatatccatttgctcaattggtgaataaaagacgttagctgcgtagtccgttaaacgtttattagcatctgggttgagtttggcatacgccgtgtcatcatcataatcaaacattgaagccgataagtttgcacgccattgctcattaaatttatatgaatagccaatattgatgctattcaacttattcataaccaaatctgttttatcttcgtttaaagagaaatcacccgcggcatttaaacttgttgaatttgccaacccactttgggtggtatacggcataaatttttgatcaccgacaatatattgataatttgcttgtaccgattgctgtggcgtgagttgatattttaagccgcctccagcaccccaacttactttcttcaccgtggcagttgcgacatctgtggatttttcattaataaagccttgagcaagtgccgttaaaggaccttgtttaaaggtatagcgacccgttaaagttggaaatgccgatactctcgaacctgtatattccaaagctacttttaaatcattattggcatcaattttccagtcataacgaatttgaggagtacgcgtataagaggttcccacaaattgggtgtaatcaacagcttctgtacgggtttccatgttggacatgagtgaccatgtttggccaaaggtccagtctttataagtgaaaaaagcatgacggatgcggaatttaccatcccccgttcccatgttagaactatcaaagaaatcggcctcgatattccctgtaaccgctttatttgggctattaaaataaacgcctaatcggcttgcattaatcatggcatcagagcgtgcatggtttgaacgtttttcactttcaaaaggtgttcggtacaggctgctggtcgttctaccacccgaatcaggcgatgatttaaaatcgaccgctgcatcaatacgggcaataccgtaaaccttgacgttatccgtccaagtgacccatgaaggagcaactggcttttctgttaccgttgctttagttttttcaatgttctcttcgatcttaacctgtttgacctgtaaattattttgagtttgtttctgagcagcaagttctgcttttaatttttgcagctcagtttctagcaaattaattctttgttctgtcgtatctgaagaatttgcaaaaatagtccctgaagccgcagcacaagctgcagctaaaattaattttttcatcttttaatccttaaagaagcgtttttccgtgtgtatttaggctacacgtgcatcgattagttcacagtcagtgactgcctgtaattcatcaaaagttaagccgtctaccatttccttgacgtaagctttttgatctttgagttcaataatgcataaatcggtataaatacggtttacacactgctcacccgttattggatagctcagttcttttacaattttgggctcaccttttttagtgacatgctccatatagacataaatcgtttttgcaccgactgccaaatccatagcaccgccaactgccggcacatcatctgccttacctgtatgccagtttgccaagtctccatttaccgcaacttggaatgcaccaatcacacaaatgtccagatgaccgccacgcataatgtcaaatgagtcgccatgatgcataaagcatccgccgtctaacaaagtaacaagttcttttccggcattcactaagtcttgatcttcctcacccggttgtggtggtggaccaaaagccaaaaccccattttccgaatgtaaaaagatttctttgtcttttggcaaaaatttagcaacgttggtgggtaagccaatgcctaaattgacataagaaccttccggaatgtcattggcaatgagtttagcaatatcttcacgagaacgcttttgaactgacattagatatctcctacttttacaacgtgctgaacaaaaattcctggtgtaataatgcactcagggtcaagcgttcctagctctacggtgtcattcacttgaacaatcgtggtcttggcagcttttgccataattgggccaaaattacgggctgctttgcggtaagttaaattgccccagcgatcggctttatcggcataaatcagtgcaaaatcagcttcaagtggatattcaagcacatagtttttaccgttaatggttcgggtctctttaccctcggcaactttagtgccataaccagtcggagtaaaaatagccccgagaccagcacctgcggcctgaatacgacaagccaaattaccttgtggaaccagttctaactcaatttttcccgctctatataagtcttgaaaaacggttgatccagcagatttcggaaatgaacaaatcatttttttgacacagccagcaataatcagatttgttaaaccacgatcaccagaagctgcattgttatttacaatggtgagttctttttttcctaaatcgattaaggcttcaattaattcagcaggttgccccgtcacaccaaacccgcctgtcatgatggttgccccatcaggaatagcttttaaaatcggttcaatgtcactggtgattttatttatcatctcacttgtcccttttcatccttaatttaaggtgacagattgatctgtcactctgccttttgcgggttaaataatcggtctttaataaataacaatggaattaccccgcagataaaataagctgcagccatcaccaagagtcctaaaccaatagaaccgttttgcgatagataaccaattgttaatggagagaaaattgaaagtactttgccaatgttataagcaccgcccactgccgagcctcgaattgaagtcgggaagctttctgtcatataggtggcattaattgcatatggaataccgtaaaggaaaccgaagaacagcatcatccataaaatgttggttggtgtatttaaataaacaatgactggaataaataaggctgtaccaatggttccgaaagcaaatacagcgcggcgtcctaatttatcggcaacgatccctgcgatcactttggcaaacatcataattaggaatgtaccgaccatatacatcgccatttctttaaacttgatgccaaggtcagactctaaataagcaggtaaccagttacttaccccgtaataaccaaactgcaatgcaccagtactaataatccaaagaataaacatggtgccgtgttttttatctcttaaaatctcaagatatggattttgacgttttttaggttggttactttgagcgacttctagcgcttttagttgacgggcttttttccatgactcaggttcaggtacacaaaagtgcatcaaaactgacaaaaccacaggcgtaattgcaatccagtataggaaacgccagccatgttcaggaataatatgtccagctaataaggtcgcgagtaaagaacctaaggtgtaccccgtcatgagagtagctaaaacagtcgagcgatgtttggttggcaccatctcagacattaagatattacaggcaatataaagtgcacctaagcccatggcgcctattgttcttaaaactgcaaattgcatataagaatgtgtaaagccgagtgcacaggttaatatcgaagaaaaagcaataaagaaaacaataatgcggacccgaccaaaacggtcgcaagcccaaccaccaataaggccacccacggccgaaccaaatagtgtcaagcttcctaatgttccggcttgcacaccagttaaatgaaactctgctttaagactagtgaggcttaatgccaaaaaacctaagtcggccccgtcacataaaagtgtaaaaaaagcgaatataaaagctgtaatccaaatcttttttggtgtttgaatagcttcagtgctactcatattctctgtaacagtctttgttgtcatgtccatatcctcagaaggaacatgaggcatcccatgcctcatggcatttgattttttattaggctgtagcttccctaatcatgtttttggcaataataagttgttgaacttgcgtggttccttcatataaacggaacaaacgcacatctcgataaaaacgctcgatggcatattcactgatatagcccgcaccaccgtgaatctgtacacagcggtcagcaacacgtccgcacatttcagtcgcaaacatttttgcgcaagatgcttctgtactaatgttttcgccattatcacggcggcgagctgcatctaggaccatacatttagctgcataaatctcggcttttgagtcggcaagcatggcttgaataagctgaaagttcgcaataggctgaccaaactgtttacgctcaatcgcatagtgcaatgcgtcgtttaacatgcgttcggcaacacccacgctataggcaccaatgtgcaaacgccctttatccagcactttcatggccgttttaaaaccgacaccttctacgccaccaatgagtgcagaagcaggtacacggcaattttcaaaaatcacatcacaggtatgtgaacccttttgccccattttttggtcaattttgcctaatgtaatgcccggtgtattggcctcgactaaaaaagctgaaatgccacccgaccctttaatttcaggattcgtccgagccattacggtaaaagttgcagcatggggtgcattggtaataaaacgtttggtgccgtttaatacataaaaatcgccatcttttacggcactggtttttaaagaggcagcatcagagccagattcaggctcggttaaacaaaatgaaccaataatttcgccacttgcgtaacgtggtaaatatttctgcttttgctcttctgtgccatcaatcaaaattgcacttgagccaataccgttattagtaccaattaaagaacgaaaagccggtgaagtttgtccaagttcaaatgcaactctgacttcctcttccatagtgatgcctaagccaccatattcttcgggaattgtaagaccgaacaaaccaagctcacgcatttgctgcacaatgtcatccggaattttgtctttctctaccacttcgttttcacgagggatcaattcattttttacaaaatctcgaattgttgaaagtaactgctccaacatcccttcatcacggatcatctgtgatctccctttttatgtatttccatcgtacccatcagccatctccagcttgtctggataccatgttttaaatcttgtttactgcggatgtgtttcatagtacgagaacaaaaatacaaatttcaagcttttttgaaaattaatttcgtttaacgaaatttaaaattagaccaatacgtaatatcaataacttagattttttaaaagataacaactacgctcttaaaagaaataagacttgaaataaattccaaaataagcatcataaaaggaatatagttttgatatgcgaaacaaggaattcaaaaatgagtgtgtcaacagggaataatttcgtagaagtcgacttttctattcaaaaaatagcggttgttaaaattaaccgcccagaagcaaaaaatgctttaaacggtgaagttcgtaaacaactcgcacaagcttttaccgagttaagttttaacgatgagatcaatgcggttgtgctcacaggcggtgaagaagtctttgctgcaggtgcagatctaaaagaaatggcaaccgcaacttccacagaaatgttattgcgtcatacagaacgttattggaacgcgattgcccagtgccctaaacccgtgattgctgccgtaaatggttatgcattagggggtggctgcgaacttgcaatgcacgctgacattattattgcaggtaaaggtgcaacctttggccagccggaaattaaagttggtttaatgcctggtgctggcgggacacaacgtttattccgtgctgtgggtaaattccatgccatgcgcatgattatgacaggcgccatggtcaaagccgaagaagcttatttgattggtcttgtttcacaagtcacagaagatgaccaaactattccaactgcaattcaaatggcacaaagcctcgcaaaaatgccgccgattgccctgcaacaaattaaagaagttgcgttgatgagcgaggatgttccattaaatgcaggcttaactctagaacgaaaagcattccagttgttgttttctacggaagataaaaatgaaggcgttcaagcttttatcgaaaagcgtaagccgtcgtatcaaggtaaataatttaaaaccataataacaaaggaatgaaaatggccaggaaagtattaattagtgcaggtggttcagggattggacgatgcattgccgaggtatttttaaacaatcaggatgaagtttttgtttgtgatattaatgctaaaagcctagaacaatttcaacaagattatccaaagctacatatatatacctgtgatttggctgatcatgagcaaattaaactgatgtttagtcaagccattcagaaacttggcggtattgatattttagtcaataacacaggcatctccggcccaaccgttgcagcagatgagctaagttttgaagattggaacacggtgattaatttaaacctgaatagcacttttttaattacccagttagccattccctatttaaagcaagcacaggcaggcgtgattataaatatgtcatctattgccggacgcttaggctatccatatcgattggcctattccacttcaaaatggggactgattggttttaccaaaacgctttctatggaactcggtgcagataatattcgagttaacgctattcttccgggtgcagtcgatggtgatcgggttcaacgcgtattacaggcccgtgccgatgtagcgcagacctcacttgaagaggtgactcaaaatgcactgaaaaatcagtcgctcaaatattttgtcaatccaaagcatattgcagatttatgcctatttttagcgtcagacagtggtcgctcaatttcagggcaaatcttacccattgatggtgataaacaatgcttaagctaaatcacctaaccctatttttccgtttaatttcaaatatagatcaataatcaggatgatcgacatgacttatgatattaaaagcatggctgtgattggtgtaggtgtcatgggcagtggtattgctcaaattgctgcacagtcaggtcataccacttatttatatgatgccaaagcaggtgcagcagaacaggctaaagaaaaactggctgctacatttcaaaagttagtcgataaaaataagattacatctgagcaagcagcagcggcaaataaccatttaattatcgctcatcaaattgaagatttaaaaaattgcgacctcattgtagaagcaattgttgaacgtcttgatatcaaacaaagcttgatgcagcagcttgaagatattgtttcggataatactattttagcctcaaacacctcttctctttctattacagccattgctgcaaattgcaagaagcctgagcgtgttgtgggttatcacttttttaaccccgttccactcatgaaagtggtcgaagtcattcgtggtttaaaaacagacccacttattattgatgctttaaacgatctgtctcgtgcatttggtcatcgccctgttgtagcgaaggacacccctggatttattattaatcacgcgggccgagcttatggcaccgaagcgctcaaaatcttaaatgagaatgcctgtgatatcagtgaaattgatcgaattttacgtgacggcgtaggatttagaatgggtccttttgaattactcgatttaacaggccttgatgtttcgcatccagttatggagtcgatttatcatcagtactatgaagaagcccgctacaaaccaaacccgctcaccaaacaaatgctagatgctaaacaacttggacgtaaagttaatcagggtttttataactatgaaactggttcaaaaacaggtgaacaacctgcgaagtttgtagagcgtttagcaaaatatccaaaagtttgggtcgctgccgatttcttagacgataaaaaacagctcgaagattatttaactcagcaaaatattaccttagacaccaattcggaaccacaaacagatagcttatgtttgctcgcttgttacggtgaagacacaacccaagcggctactcgccttgggattaacccagaacaagccgttgctatagacatgctttatggcattgcaaagcaccgtaccttaatgccttcacttgttaccaaacctgaatatcgtcaagcagctcactctattttcaatctagatggaaatatggtcagcatgattgctgaaagtattggctttgttgcgcagcgcgttttagcaatggttattaatttaggttgcgatattgcccagcaaaatattgcaacggtagatgatattaatgctgcagtacgtcttggtttaggttatccatttggtccaattgaatggggcgatcaagtcggtagcgaaaaaatcttacttattctaaaccgtataacagcacttacgcatgacccacgttaccgccctagtccatggttacagcgtcgagtcgcactccacttacctcttacttttactcatgagtcttgaaaaggaatttctcaatgttaaatgcatatatttatgatggtttacgtagtccatttggccgtcatgcaggtgaacttgcctcaattcgtcctgatgatttggccgcaactgtcattcaaaaactactagaaaaaactggtgtaccgggcgctgatattgaagatgtgattttaggcgacactaaccaagcgggtgaagatagccgtaatgtggcacgaaatgcattattacttgcaggtttacctgttactgtaccgggccagacggtaaaccgcctatgtgctagtggtttaggtgccgtgattgactcagcacgtgctattacttgtggtgaaggtgaactgtatattgctggtggtgtagaaagtatgtcacgtgcaccctttgtgatgggtaaagcagaaagcgcttatagccgtgatgcaaaaatttatgacaccaccattggctctcgctttccaaataaaaaaattattgctcagtacggcggacattcaatgcctgaaacgggcgataacgttgcagccgagtttgggattagtcgtgagcaagcagacttatttgcagcccaatcacaagccaaatatcaaaaagccaaagaagaaggtttctttgccgatgaaattactccaattgaggttttccaaggcaaaaaattgccccctaaattcgtttcagaagatgaacatcctcgcccaagttcaactgttgaagcactcacaaagttaaaaccgctatttgaaggtggcgtggttacagctggtaatgcctcaggtattaatgatggtgcagcagcacttttgattggttcagaagcagcaggtcaaaaatatggcttaaaaccaatggcaaaaatcttatcagcggcggctgcaggtattgagccacgcattatgggtgcaggtccgatcgaagccattaaaaaagcggttgcacgtgctggccttactttagatgacatggatattattgaaattaatgaagcctttgcttcacaagttttatcttgtttaaaaggtttaaatgttgattttaatgatccacgtgtgaacccgaacggtggtgcgattgctgttggtcatccacttggtgcttcaggcgctcgtcttgcgttaacagtagcgcgcgagttaattcgccgtaagaagaaatatgccgtggtgagcttatgtattggtgtaggtcaaggtcttgcgatggtgattgaaaacgtttcataaccattgaaccggatatccattcatcacaacagcgcagtgatgaatggatttattttgcagagcgaaatataatggcaaaactattgctttaattatatttgaggatcgaatgtctcaaaacacggaaactgaaaaaccaataaattttgatgagatacgtttagatcctatttcgcatatacatcgggaaaacaacccgcaatttattgcttctttagcacgcggtttagaacttttaagatgcttttctgcaaataatcaggtgcttggcaaccaagaattagcaaaaatgacaggtttacctaaaccgaccattgcacgtattaccaatacccttgtgtcattaggttatttaaaacaattgcctaactcgaccaaatatacattagatattggcgttttatctttaggatatgcagcattatctaacatctcgattcgtaatattgctcatcaatatatggaagagatgagccagtatgttcaagcgcctgtagcgatggcaacgcgtgatcgcttaaatatggtgtatatcgatgttgtgcaaattgaaactgcattaaacatgcgccgtccaattggttcaactttaccactgcatagcagttcaatgggccgagcatgcttagctgcgacccctgaacgtgaacgcaactttctacttgatgcactaaaacaaaagaaccccgaaaactggccagccataaaacgctctttagaacgagctttccgtgattatcaagattatggatattgtttgtcgttaggtgagtggcataaagaagtgaactcggtggctgtacctttggttagttctaaacacggtctttatgtttttaactgtggtgcgccaagttttcatttaaatccagaaaaacttgaaggtgaaattggaccacgtttaatccacatggtgcacaatattcaagatgctttgaatgaaacgcactaacaatcgtgcttagacagtcatggttgtgttgattaaggttccactttcattatgactataggcatgatgaaaaacgcactctataccccaaccattattttaatggcgattgccgcaggcatttgtacaggtggaaattattttagtcagccacttattcactcaattagtgtaagcctaaatttaaccgaaacaaccacagcgtgggtgcccactctagcccaaatcacctacgcatgtggcttactctttttaatgccattaggggacataatagaaaagcgcaagctactatttatctttatgttattggcttcaagtggattaattattagcggtttttcgcacaatatttatcttttactgcttggcactatcattactggtttattttccagcgcagcccaactgttgttaccgcttgctgcaagtctggttccaattcaacaaagtggccgtgtcgtaggctttttactgagtggactgatgatgggggttttaatcgcccgctccctttctggactgatgtctacactttttgcatggaatattatttatctggttagtggttttctgttacttgtgattgcctttattttgcatcgtaatatcgggttatttccaccgactaaatctgaaaactatgcgaaaaccattcgttctttaccacagatttttattcaaaatcgacgtttaaggactagaacttatattggtggttttacatttgcatgcgtgagtttaacctttaccaccatgtcgttgcttttggctccggcgccctatttttttagtgactttaccattggccttttcggttttgttggcgtgttaggaactttcgttgctaatttttcaggcaaatttattgaccaaggctatatccataaaatttcaatttattgcggcattggccttatattaagttggattcttttttcacttttaccctaccattttgctttttatattattgccttactcattctctacgcttctctttctgctgtacatgtcaccaatcaaagtattgtatttaaacttaatcaagaattacgttcacggtttaatgccatttatatgacaggttactttgctggcggcgctttaggcacaacagcgggaagttatgcttggaaacactttggatggacaggtgtatgtattttaggcttaatttttgccgttttatgtctttattattgtgtacgtgatgcaaaaaatcagcacaattaaaacttgtgctgatctcaaaataggctaatagttcgttataaaagccctgataaacgtccgcgaataatatcttctgcctctttgacaattcggttaaccagttcatcgcatgtcggaatatcatgaatcaagctagccaccaacccacatgaccatgctcctgcattaacatctccatcaatcatgacttttggataaacccctgcaacttcttcaataatatcttcaaacttaatgttatcaccgagtgctttttcttttgccacgattttttctacggccgcattattcatgacacgttcaatatttcgcaaagcacgcataattaaacgcgtatctcgttcggttgcattcagaatcgcctgtttcacatttgcatgtacgggagcttcctgagtcgcaataaagcgcgttcccatattaattccatcggctcccatcgctaaagcagccgcgagtgagcgcccatctgccataccacctgaggcaacaaacgggatgtctaatgcatcggctgctaagggcaataaaatcatatttggcacgtcatcttcaccaggatgcccaccacactcaaaaccatctacagaaaccgcatcacatccaatttgctgagcttttaagctatgtcgaaccgaagtacatttgtgaattactttaataccagcagcctttaaatatggcatcacctgttcaggattacgccctgctgtttctacaatctttacgccacctttaataattgcctctacaaaacccggataatcaggagtatttacggtaggtaaaaaggttaaatttaccccaaaaggtttatcggtcatttctcggcaacgtgcaatttcttttgccagattttcaggtgtacgctgagtcaggccagtgataatacctaacccgcccgcgttcgaaaccgcagcagcaagctctgcaaaaccaacataatgcataccgccttgaataattggatgctcaatttcaaatagttctgtaattttggtcttcatattctttccactcactgttctatagccagcctcttatttccctagcagggctagatgcttatttacacataaatcctatcagtatttaaagtaatttaagttaaaaatttcacaatacaaaattttataccacaatataaaacaaaataattgataacggaattatttttcgatagcatcagtttaaattttagacggaaaattatttaaaggaatgaacgatgcagcagaacaacaaaacccaaagcgagcttaaaacaggcacaattcataagtattttgatagaaatatactaacgctcaccatgagtaatgccactaaaaagaatgcaattaattatgaaatgtatgcagctttaagtcaggcattagatcaagctgcaaccaatcaagacattcatgtggttgtgcttactggtgaagactccgcatttaccagcggcaatgatgtaaacgcatttgaaaaacgagataccaccacttcagaaccacccgcttcgattgttttcttaaaaagcttagcaacttttccaaaaccgattattgctaaagtaaatggtgtggcaattggcattggcagcactatgcttctacattgcgaccttgtatatgcaagccaaaactctatttttcagttcccctttgtgaatttagggcttgtacctgaagcgggttcaagttacatcttgccaagattattgggctttgctcgagcttcggaaattattttactcggtgaaaagttttcggtggaacaagcaaaaaattatggtctggtaaatgaaatatttgaagccaatgagctggatcaagtggttgaagatgtggcaattaaacttgctcacaaaccaagccaagccttacagctcagtaaaaagttactaagagatatgccaattgatgatctactcaatcgtattgaccatgagtcgactattttctcgcattgtttacaaggttccgagtttaaagaagcattaagtgctttcaaagaaaaacggaaaccgaactttcataagcaaacagcctaaagcttacccaataaaaagccagccttgaaaaaaacaaagctggctcttataaatggatcaaataggtttagctaatctcggtacgaatattattcaccatatgtaaaagacgtggtgcaatatcttcttcgagtttttcacggttcataataaagcttggaccaccacagttaaacaccaataaaccatgttgttcatgaatgagtggaaccgcaaccgaattgacatctttatgccattcgccaatagaaaaacagtatccaaaatcttggtaatctttaaaggctttgtctaaatcacggttaattttgatccagtcttctttgtgcttgttacgaatggcattaagtaagaactctctttcatcttcaggcattgcagctaaacacgcacgtcccatcgaacttaaatgaatcggtaaataggttccaacttgacggcgcatggtcatattgcctttgccttgcaccacatcaagataaatcatgttcagtcgatcacgtgttgccatggctacagcagcgccagcatagtctgccaaatttttcatatatggatgagcaatagagcgaatcgatacgttagacagcatcgaataaccaaacgcaagaactccaactgaaagctgaaatttgcttgagttaggtacttgtttgatataacccaaacgcgacaaggtatgtgtgaggcgagtaatggttggttttggcaaacctgtcatctgagcaagctcttgattgcccaaatgctgatgtttaggcgtaaaacaacgtaatagctctaaaccacgtgctaatgcagtaataaattgacgatcattttcatcctgcatgtcttcaatcggatgtaataattcatgccttaaaggcgctaataatttttctgtctgttctgcatcaactgcatcattcattgtcataccaatccatattttgtttcgcactgcgaaaattataatctattttttctataaatagcaaaagagcaaacatcctagtctgcattttaaagataacttcatttaacttattaaagcgaaagattaaatattttattttctgattttaaatataattttaatcttccgcttctaagccacctacccaattacgcccttttctttaagctctgctagtttttctgaagaaactattcgccccaaaacggcctgcgtatgctcacccaacagcggaggtgctgttttgtactcaactggcgttctagaaagtttgattggtgacccaattaccttcagtttttcacgttgaggatggttcatctcgactaacatttcacgggcaatcacttgcggttcttgaaaagcttgttccaagttattgattacacctacgggaactttagcagcataaattgcatctacccattcatctgctgtttttgttaaaaagtgagtttgtaaaattccgataatttcatcgcgatgcttaatgcgatttgcatttcgggcaaaacgtgcatcgtttggtaaatcgggtaaaccaatacttcgacagagttgaataaactgagtgtcatttccacacgcgataataaaatcacggtcagaagctttgaacacttgataaggcacaatattagcgtgtgcattgccataacgcttagggatatttcctgatgacaaataattcattccctgatttgccattgtggcaatttgaacatcaagcaaagccatatcaatatattggcctaaacccgtcacatggcggttgagtaaagcagcctgtatggcaatcgtagaataaagtcccgtggctaagtcagaaaatgcaacgcctactttttgtggaccaccacccggcaaatcatcacgctcacctgtaactgacatgagtccgcccatgccctgaataataaagtcataaccgggctcttctgctcttgggccagtttgaccaaaaccagtaatcgagcaatacaccagtttagggttaatcgcagataaagactcgtaatccaaaccgtacttctttaaagaacccgctttgtagttttcaatcacgacatcggtatcttgaataagcgctttaatcaattcttggccatcaggattggcaatgtcgatggcaaccgatagtttattgcggttggttgactgataataagcggcttcttgagtatcttggcctgagtcatctttcatccaaggtggtccccaagaacgggtatcgtcaccaactttcggccgttcaatcttgattacttctgcgcctaaatcggcaagaatctgcccacaccaaggcccagccaatacccgacttaagtcaagcacccgaattccatttaaagcacccatctttatcccactatattttgtgacttatttcctataggaaaacttatccatttaaaatttcgcatagcgatatatatttttaatatacacacctcttttgaaaaatcaaactttaattttccactaaaaataatgattttttacaagaaaatatagcttaaataaatcaacaaattagccaaatataaatcaacaacagagtatcgcattgcgaaattaattttcaaaatatattgttttgcgttcgtcctttgattactatcacttcaaatattggtgattttacgaacatcacattgatgttttctgcatgtagtaaaaggacgagactatgattcgagatcaggaaaccttaaatcaacttgttgatatgattcgacaatttgttgaaggtgtattaattcctcatgagaatgaagtcgctgaaacggatgaaattcctccagatatcgttgagcaaatgaaagctctcggtttatttggtttaaccattcctgaagaatacgaaggtcttggcctgacgatggaagaagaagtctatgtggcttttgaattgggtcgtacctctcctgcttttcgttctctcattgggaccaataatggcattggctcaagtggcctgattattgatgggaccgaagcacaaaaatcctttttcttaccgcgtttagcacgtggtgaagtgatcagctctttttgcttaaccgaaccggatgcaggttctgatgcggcatctttaaaaaccagtgcagtaaaagatggcgatttttatgtgttaaacggcaccaaacgttttattaccaatgcacctcatgctggtgtatttacagtcatggcacgcacaaactttgacattaaaggtgctggcggcatttctgcttttatcgtcgatagccaaactccgggcatttctcttggcaaacgcgataaaaaaatggggcaaaaaggcgcacatacctgtgacgttattttcgaaaattgtcgcatccctgcttccgcactcattggtggtgttgaaggtgttggttttaaaacagccatgaaagtactcgataaaggccgcttgcatattgcggctttgagcgtcggtgcagcaacacgaatgctagacgattctttaaattacgccatcgaacgcaagcaatttggacaaccgattgctgaatttcaactcattcaagccatgcttgccgactcaaaagctgaaatttatgccgctaaatgtatggtcttagacgctgcacgcctacgcgatgcaggacaaaacgttagcactgaagcctcatgcgcaaaaatgtttgcaaccgaaatgtgtggccgcgttgctgatcgctgcgtacaaattcacggcggtgcgggttatatcagtgaatatgccattgaacgtttttatcgagatgttcgtctgttccgtctctatgaagggaccactcaaattcaacaaatgattattgcccgaaacatgattcgcgctgcgtcttaatcaaattttaagcactttaaaacgacttgaagtgctttttatcaaatgtaggtaatggattatggctacaaattacaaagacggtttttctcgtatacaacctcatacgtggaaaatagcatttatttttgcatttctagcactattggtagatggagcagatttgatgctgctgtcttatagcttaaatagtattaaggcagattttggattaagttcagtacaagcaggtatgcttggcagttttacattagcaggtatggctgttggtggaatttttgggggatgggcgtgcgataaatttggtcgcgtgcgcattgtggttatttctattttaactttctcgctcctcacctgtggcttaggtttcacccaaagctttcttcaatttggtattttaagattttttgcatcactgggtttgggttcactttatatcgcctgtaataccctcatggccgaatatgttccaacccgttatcgcactacagtactgggcactttacaagctggctggaccgtcggctatattgttgcgaccttgcttgcaggttggattattcctgatcatggctggcgcatgctgttttatgttgcgattattcctgttgttattgctgtcctcatgcatgtgcttgtaccagaaccagaagcatggcaaaagtctcgactacaacaaccagtcatggctcaaaacgcatcgaaaacctcggcatttaagcttattttccaagataaacgaaaccgtaatatgtttatcttatgggcgttaacggcaggctttttacagtttggctactatggtgtaaataactggatgccttcatatctagaaagcgaactgggtatgaaatttaaggaaatgaccgcctatatggtaggtacatataccgccatgattttaggtaaagtccttgcgggcatgatggcagataaattagggcgccgttttacttatgcttttggtgcaatcggcactgctattttcttacctctgattgtcttttataactcgccaagcaacattctatatttactggtgacctttggtttcctctacggcatcccgtatggcgtaaatgcaacctacatgaccgaaagctttgggacagcaattcgcggtacagctattggtggtgcttataacgtcggacgtttaggcgctgcattagcccctgcaacgattggtttcttagcctctggcggctcaattggtttaggttttgtcgtcatgggcgctgcctacctcatttgtggtgtgataccagccctattcattaaagaaaaaatatacgacccacaaaagtcgtaaaaagatctatcaaataggtcatatgcctatctgattgatagtgctaacgatcgaaacatgttttttaaatcgttagccaaaaataaggaattgacgtttcaaagttattccttatttccacatatgtagagtttattactcttcattttaattttttaggtaagcttagctcccaagggagctaagcttaaaaatatattggcctaaattatctttaaggtcgttcaccctgctccaaacggcgttcaatatcatctagtatgtttggtaagtcagcgacactatcaatcacatagtgagcgcctgacgcattcattttttggtatgccttatcttttagcacaatttgttcatcggccgataatgcgctccactcttcatagcttaaaccgacttcattgccactaattgcaagtcctactgtccaacatcccgcatttaaaccttcatcaatacccaccacggtatcatctacttttacaacagttttgatgtccgatacgtcgagttgaattaagttcttccataacatttcaggatatggacggccatatttcacgtcgctagcagtaacgatacagtccggtcggtaaccctgatcagcagcatctttaactaaacgaccaatcatcatggatgcatagcccgtgttactgccaatttttgcaccacgctttttaatattttcaaaagtagctaatgcccccggaattaaagcagaacatttcggaatagaatttaactggtacggaataaagtctttatataaacggtcaatatctgcttcagttgccgcctgcccgtatacttcctgccatgccgctgctacacgcggcatttttaaaacagctgcaatatggtcacgtttttctaaccccattggggcacgcgcttcttcaaccgtaatttcaactttattgtctttaaataaagccataaaagctaaaattggtgcgcgtgagccaaaatctactgttgtaccagcccagtcaaaaaccacagcctgaatttgtgtgttgttggttgtcatgatgtatccccttaatttaataaaaattatgctgttacagcttggtttaggtggttttcgcagtagctcgcaattgcagcaagaagcccttcaatatcttgaatataaacttcgccaatattgcctatacggaagcagttgagatctgtgactttgcccggataaattacatagcctgatttttttagcgtttcatagaatgactgaaagctaaatttctcggctgttgggtaaagaaaagtggtaatgatgggtgattgtaggcactcttcaccaagtaccaactcaaagccaagttgttgcatacctttagataaggtttgttggttttgtaaataacgttgataacgtgcagcaacaccgccttctgtctcaagctcaagtaatgcttgataaaatgcacgtaccacatgggttggcgaggtaaaacgccatttgccgttatgctgctccatggtattccactgatcatacaaatcgaggctaaccgaacgtgccaaacctttacatgcttctagacaatcacgctttgccaaaataaagccaaagcccggaacaccttgaatacatttatttgcacttgaaattagaaaatcaatttcaagctcagccatatccataggtactccaccaaatgaactcatggcatccacaatccagatttttcctgccgctttaactaaacggcctatctcttgaatcgggtttaaaataccagtggtggtttcacagtgcacacaagcaacatgactaatggttttatcttttaaaacacgctcaacttcttgtaaatctggtgtttgggtttctaaatagttcagctcgatcacttcaatatttaggcaacgcgccatttgcaccatacgtgcaccatatgcgccattattaatgatcaagattttgccatcacgtggaatagctgacccaagcacagactccacagcaaaacttccactgccttgcattaacacagccgtatatttttcaggttcgctggttgccaactttaccagtcgattacgaatatcttgtaccagcgagttgtattcttggtcccaagtacaccagtctttttgcatggcacggcgtactgttgccgatgttgataatggtcctggagtaagaagcaaatacttgttctctaaatccatatcgagttggggttgcatgttcataatgttactcatttctttcgcgttcatttcaatatacatcaatctggtttaaaccagatgacaaactagtaaatattttgttctaatatttctttcataaagccagcccctgtagtcatgcctttgccagcaatcgcactcaccagaaagatatttttttcagcttcagtgacacaggccaactcatgttcatgggtcaggtaataaccattccaacgtttttgaattggaggtaaattcagccctagtttttcatggcagtaaacttggataaattcattaatctcttcacgctgctcgaactgaggcgcttcattaatcgaatgatattcatgactatcgcctacgatcagttcgccaaattcgttttgtttaatcagaatatgaataccgaattctttaatgaaaccctgttgtgacgctttaaccagctcagcatgacttgggcaaatttcaaaagccggataacgtgaaatagataagcctgaataaagagaagcatttaatttttggtgaaaccgttgagtcagggccatttgtaagccacagcgtttcagattcaagctttgtaagagatccggatataaaacatcgatgatttcaccgtggcagatcaaaactttatttgcccgatatgcctcgccacttgccaagcgaacctgacaaatttcatgttgatattgggtttgaacgacacaagcattggtataaatatttacgccttttctttcggcatatgccaatagtcgctgcccaaccacatgcggttcgaccgaataatcttcttcaaaaaccaaaccgccttgaaactgctgcgaaggatttaaataagaaaattgggtgaccaattcctcatggctaaacaaatgaactggaatttggtaattatttgcacgctcggcaaactcatttaaaacctgccattcaagtgccgtgtttgccagatagacaccttggcgttgagcaaacgaaatatcggtttcagtttgaatacgctgataaaaagaacgcgtttcaagcgcgtactttcgccactgttgctctggatgggttaaggtcgatgttccgaccatgccgaaattacggcgagttgcgcccacaggcttggcatttttctcgaagatgcaaactttcaagccttgttcttgtgcctgtattgcagcggacaaacctaaaataccggctccgacaacaattaaatcaaactgtgcattattcataagacttccaatttgcgaaatttaggatgaataaacccttgccttgttgaacaaagcatttcgtttcagtcggttaaataaaaattgtgtttagctaaaacttagtgagcgctttcacgccattgctgacttcttgccataatttttctggtaaataaccaatgaatgagttttacaacacatgaggtggttaaaatcaaaatgctcatcgcaacagcagcaaccgtgtctcccgcatcatccatatttaaaacagctaccgcagctaaactggtgtctggtgaatagaggaaaatggcagccgatacagtggtcatggcattcacaaaaatatagaccgatacatcgcatagcgctggaaaacacataggcaaatacactttccaaaaggttttccacttcgatgtacctaaagtttgtgctgcttggtcgagctgtagcggaatttgtttaatcgcattggttaaagtcagatgtggcacggtgtaataatgcacaatggttgaaatcaccaaaatggtcatggttccatacagcacgtttaacggattactctgctggttaaaaaacaaaatataagcaatacctagaaccagccccggcacagcaagtggtaataaaaccaaagcttgcacatagtttttaataagtggatgtgccttaaaacgttcggttaatagtgccaccataaaaatcagtgctgttccaaaaaccgtactaaagagtgccatgcgaaccgagttaaagtacgctgcccaaccgccaccatcgacatattcaaaactgtaatgcgctaaggtcaaagacaaatcataaggccaagactgaatgaatgaagccagcactgccgtaaaaacaatcagtaaaatcgaacctgaaaccaaaccacaaaatatgcttagaacaacttcaagttttttattcgatgctgaaacataaggtttagtctgaaaggcttgaaaccgtgcatgccgcttgctttgtattcgatcaaaaataaatacaaacactgctggtagcaacaataagatggaaatcaccgcacccatgctcatattttgctgaccaataatctgtttatagacatcaagcgccatcatgttaaatgaaccgccaatgactttcggaattccgaaatcggtcaatacataaataaaagccactagacttgcgctaatgagtccataccgaattgctggtagtgtgacgtggtaatgggtcttccagatatttttgccgagcgacaaagatgcctcaattaaacgctgatcgacactgcgaaaagacaccatcatcaacattaaaattgctggaaatagccaaaagcagtaactgattaaaataccgattggaccataaatttgtatatcgcccagcaaaggtttaaacacaccttgcttaccaaataaataaaccaatgccaaagaaggcaaaagtgatggcgctaaaatcggtaaaaaagccaccaatttaaagaagcctttaccttttatatttacattggtgagagcaaaagcataaatactggcaagaaatactgtaatgacagtagcagcacaagcaacccacaccgagttaaatacagagctgagtaaagctggacttacaaaatagttataaaaattttcaagaccaacaaaattttgattttcatcaaaaaatgcagtttcaaacaacatcattaaaggagcaataatcgctaaagttaaagcgattgcaacggctgctaaagcaacatttgatcttaatgaatattcagtttttcgacgcggctgtgtttttaaaaccgctgaagcagcttcatttaacatagtgcgtacccttgttcgtcaaagacatggatgagctgattaggcacttttataaacatcagttcttgtaaagatttgaacttgatattttcaatttcaatttgcaaaaggtgttttgcctgctcaattccatcgatatgaatagcgcaaaataaacgacgcttggcacctaaaaattcagtgcttaatactttaactggcaaatacaacgactctttatcactaccaaaatcatcaaccaactcgacagcttcgggtctaaaaccaatgctgtaattttcccctgctttaagtttttgttgctccaaatttagaggaataaaacctaaaacctcgagctgattcggtacagcgcaagtggcttttaaaaaattcatggtgccaataaacttggcaacgaattgggtttgtggcttgtagtaaatattgtgcggcgtatcaatttgctcaatgacaccatgattcatgactaccacacggtcagaaatgcttaatgcttcttcttggtcatgtgtgaccataatcgttggcaaattaagctgtgattgaatcgaacgaatcttttgtcttaagtttagacgtacctgagcatcaagtgcagacaatggttcatcgagcagtaaaatatcaggcttcggtgcaattgcccgagcaagcgcaacacgttgttgctgaccacccgacaattggtttggatattttttagcaatatcaggtaactcaatcagctctaataattgctgaactcgttggctacgctgtgccttatcgcatttctttttgtctaagccaaacgcaatattttcttctacatttaagtttggaaataacgcatagttctgaaacacaatgccacagtgacgcttttcagcacttagcaacgtaatgtctgcgcccttttttatgacttttccataatcaggtttttctagacccgcaattatgcgtagcaatgtggttttaccgcatccagaaggtcccaaaaagctcacgaactcgcccgctttcaggtctaaattaatatgcgttagggcctgaaagtgttggaactttttttgaatatccatcacttctaaaactgaggggccatgttcaggatatttataggtcgttaaggtcgacaataaatgccctgttaactcggccttttgattttgacctagcagcgatgactgcaatgacgaaggtatttgcataatgaggcccttatcccaaagatcacttttcaaaacgctttgaccattcagccaaaatacgttcacgctgctcggccgcccaataaaaatcattttttatgagcatttgaggaagatttttcgggaagtccatagtagtattttcaatgcctttataggccaccattgaaaagttatgggcataggcttcgtttgccgctttgcttaccgaccaatttataaatttttgcgcgctacttaatttcttggttcctttcacaattgctgaggcttccatttcccagcctaaaccttcagttggataaaccacttctaaaggtgcaccttctgcttttaacttaaatgccggataaccaaaagaaacaccaattggaatttcaccttgtgctgccatcttgcaaggttttgaacccgagtgaggatattgtgaaatgtttttatctaaagcctgcatatagtcccatgcctgcttttcgccccaaatctgcatccaagccgtgacatctaaatagcctgtgccactcgaagctgggtttggcatcacaatcaagtttttataaatggggttggttaaatctttccaagtttttggaatcggtaacttacgtttttctaattcgactttattgacacaaattgcagattcccatgcatccatacccgtccacgttggtacaggtttttgacttacaaattctggttttaaattttgaataccttcaggtttaaaaggctcaagcatgtctttcttttccatgaccaacaaactggttaaagccacaccaaaaaccacgtccgcttgtgggtttttctgctctgccaaaagtttggcggtgattacaccagttgaatcacgtacccattttacttttagctctggataagctttgtgtaattcttcttggtattgcttaagttggtcggcttccactgccgtatagactgtaatttcttctgattgttttgatgttgctgatgaacatcccatttgaatagcaactactacacctaaaactgatgcagtaccgagtttaattgtctgttgaacatactgtttcatctgcaaaccatcgaatgcaattatttgatgatggtatttcaacagctttatatgacagtttaattaatctggtttaaaccagattgcatttttatgctcgcgcttcgaaatgtaaatctaaaacatcatgtagccaatattcttggtcaacatcagtaatcacaccttcttcatttctgttgctacggcaaatatataaaccaagcgcgccaacattcacatgcagtgctttggcctgctgttccgataaagctgttggatacagattaatatcagctctggtgatatggcagttatattgatttgccatcagtaaagtaatggattgcttgagatcatgagttaaaaactcgggaaaaagctcggcattcacacgtaaatgttcaaccaaaacaggtcgaccattaatacaacgacgtcgccaaactgaataaatcggatgccctttttcaacttttaaatgtttggcatcccaagaagtagctgtcgttagctcactcgaaatcacttctgtcgaaggttcataaccttgttcaatcacgaactgattaaagtttttagtcgactgcggatgataaataatacgaggagaacgaacataccaaccacggcggtctagtcgataaatcagaccatcagtttccaaagccagtaaagcttcacgtgcagccactcgtgtggtttggaattgttccgaaagtactctttccgaagggagttttgcgtgggcttctaatacgccagattcaatatcatgggcaattgcatcgcgaataggaatatatttaggtatgcgtgcttggtcctgttccatacaaacttagaatttataaataaagaaattaatagcaatatactgaaaaaatatgacaaaagcttttattaatgctgatcttttaagcaaaacaatctcttaagctagtacggcccacttaaatttttctataaaaaaagagcattttcatgccctttttatttttacttagtctttagctggcgtgcttaaaactatcaatttgcttaatttcataaggcaacccgacatagttttcagccaaggttgttttacccgcaattgaacccagtacataactcaactcggcttgtttaatcttatggtcaaactcactttcagtttcaaaacgatgcaataaatgagtcatccaccaagaaaaacgctctgctttccatacgcgttgtaggcatttttcagagtattcatttatcccttgttcggaaccttcggcgtaatattcaatgagtgcgcttgataaataagcaatatcagatgcagcgagatttaagccttttgctcctgttggtggaacaatatgcgcagcatcacctgctaaaaatagttttccaaaacgcattggctcggtcacaaagctacgtaacggcgcgatacttttttcaatagaaggacctgtcactaacttttcacggctttcaggatctaggcggttttttaactcatcccagaacttttcatccgaccagtcttcgacgtgatctgttaaagggacttgtaaataataacggctacgtgtttctgagcgcatactacataaagcaaatccacgttcagactgtacataaatgagttcatcggctacaggtgggacatcggccaataaccctaaccagccaaatggataaactttttcaaaggttttaattttgtcttctggcacactggcacggcagacaccgtggtagccatcacaccctgctataaagtcacactgaatttgaaaggctttaccttggtactcaaactcaacttttggtgcagtgtaaaagtctttcacttgtacattgtgagcttcataatatgaagtgagctgtgctgcttcacgcgcagtcattaaatctttagtgacttcggtctgaccatatacagtcacttgtttaccacctgtgagtgcggctaaatcaacccgatgtaactcaccattggttaagatttcaatgcccgaatgcggtaatcctttttcttttaagttttggtcaacgccggcttgtttcagtaagtcgaccgaaacttgctctaaaattcctgcacgaatccgtgaagccacatattcagcactacgttgctcaacaataatatgatcgatgccagctttatatagaagttgcccaagcaataaccctgctggtccagaaccaataattgcaacctgtgtctttaaaatatccataacttcatccttgtttcatcctgacttttaaattactggctttaagttttgttcactatgtatccaagacgaaaataaccgtttatcatttagtttgtccgaatagcggacagaaacaaccaaaataacaggaatgaaaggatgccttctctcgatgcttttctagagcacccgaactcgcatgagaaaattcgtcaagatgactacattgcaggattagcaaaaggcttggctttattggaagcttttggaacagatcgccagcggcttaatgtcactcaagtggcagaacgaacaggtattagtcgtacagcggcaaggcgttacctaaaaactttaaaatacttaggctatttagaaactgatgaacattacttttggctcactcatcgcgtgctgcgcttttcgagttcttatctaagctctgcccacctgcctaaagttgctcaatcatttttaaatcttttgtgcgcgcagacgtcgctgactttttcaattgtggttctggacgataacgaagtggtgccgattgcccgtagttatttaccacagcaagataatttacgtgtcaacccttatggtatgcatttaggaaaccgactccctgcccatgccacttccacaggtaaagtattgctggcagcactatccgaagaagcacaacatacgtgggtaaaaacttacggtttaaagcgcttaacgccatttaccatagtagatgagtcaaagttttttgaagtgcttaagggtatttcattatcggattattgtctttccaaagaagaacatgagcttggtgtgattgcgattgccgtgcccgtttttaatgcacaaggtcaagccatagcagcgcttaactgcatgtctcaaactaaccgcgtacaagaagattatttggttcagcaaattttgccattgctacgcaacacggcaaatgaacttagaaatgtgatttaaataaacttagaaactcttgttatctattagagatacaagagtttcaactcataattttaaatagcaaattctttaacttgctggcttgccagatctaatgccttgctgcgataagcttgcatgtctaagccttctgcatagataaaatcgacgtcatgaatgcccattagacctaacactgccttgagataaggcgtgactgcctcagtttcttgaccgacatgaataccaccacgactacttaccaccacagcttttaccccttcaaccaaaccttgaggataagtttcggtgtaacggaatgtttgtcttgctcgcgccaccaaatcaaaccagtttttgagctgagtcgggacatttaagttgtacatcggtgcaccaataatgagtaaatcggcactttttaattcagcaattaattcatcagacaaagcaacgatctgctgaatgtcttgatttacattttcagcaccacgaagcgcctgaaagatttctagatctaatacaggcaagttcatttcagctaaattgcgtatggtgatgtcatcttgcacaccttggtcttttcgatgttcaagcattacatcaattaggcgattggtttgtgaaccctcacccataatgctggattttaataccaatattttagccatgaccatctccaattttttgatgaagtcatattaactccacaataaattcaacagtggtgatattatttcttatcattggttccttttaggcaacaatcatgcaacatgaactcagtgcaatttctatatttgtgactgtggttgaagctggtagttttgtaaaagctgccgagcaattgcatttaactcgctcagccataagtaaaaatattgctcggctggaagaacagcttggtgtggctctatttaaaagaactacacgttcactcagcatgactgacgaaggtactttgttttatgagcatagccgccgaacgttaagtgaaatacaaaatgcggcagctttattagaccaaaggaaaattaacgcaacaggccgattaagaatgtctgtgccagtgctgttcgggcaactttttgctgccccgctcatggttaaatttgctcagcaacatgcggacttacagttagaaatttcatttaatgaccgaaatgtagacttgatcgaagaaggttttgatttatgtataagaatcggggcattgcctgacaccactcagctcgttgccaaaccgattggtgagcatcgaatgctactttgtgcctcacctgactatttaaataaaagaggtcccgtagaacatattgaagacttagaccagcacgcgacgattgccgatccgcattttggtcaaatgcagaaatggcgacttcaaaaggaaaatgacgagcctttatttattaaacccaaagcaaaacttcttttaaatgatctgcaagctattaaaaatgcagcacttgctgacgcaggtattgcttggctgcccgattggctcattcaaaatgaattacaggatggtaagctagtacaagtgttagaaaccatgtcgagcactgcttttccgattcatttggtatggcctacactgccttttatgccactcaaaacccgtcttgcaattgattatttggcgcagcatttaccccctgaactgaacaaataagcttaaaaataaaaaagcctcgtccacttgaacaaggcttttttaattattcaaaggcaacgtttattgctcagattcaaactctttaattgcctctttagcaattcgaaagctatctacagcagcaggcacgccacagtaaattgcaacctgcaaaagcacttcacgaattttctctttaggtacaccatttcgaagtgcacctttaacatgtagttttaattcatgcggacgatttaaagctgagatcattgccaagttaattaaactgcgctcaggcttacttaactcttcacgcccccaaacagctccccagcaatattcagtgactaactcttgaagaggtaggttaaattcatcggcattgttgattgaattatttacatattcttcaccaagaacttgtttacggattgctaaacccttttcaaatttttcattactcatatattcaatcctccaaacaaggtgtatttaatttccagataatcttcaataccgtatttagaaccttcacgccccaaaccagactgtttaatgccaccaaaaggcgcaacttcatttgaaataaggcctttattaattccgaccatgccatactcaagctgttcactcattcgccaagcacggcctaaatctttggtataacaatatgcggctaaaccaaattcagttgcatttgccatttcaactgcttgttgctcgttttcaaatttaaatacggctgctagcggaccaaacgtttcttgggttgccacatccatatcagcggtaacatctgcaatcagtgtcggttcaaaaaacaattcacccgctttatgctttttaccaccaaccacaagacgaccatttttatctaatgcatcttgaatatgagcttcaacttttttcaccgcattggcattaattaatggcccaatgtcatgcccagcttctaatccattaccaatattaaaattttgaattttttggcttaaggcagcaataaatttttcataaatacctgcctgtactaagaatcgattgacgcacacacaggtttgccctgcatttctaaatttagcaatgagcgctccctcaattgctgcttctaaatcggcatcatcaaatacaatgaacggcgcattgccacccaactctaaggaaactttttttaaggtttttgctgaacgctcaagcagcattttgccaactggtgttgaaccggtaaaagtaaacttgcgtacgacatcactttcaaaaatcgcatcaccaatatgaactgcatcacctgtaatcacactaaaaatttcagcaggcacgcccgcttgcacagctaagtccactaaagccaaagcagtaaaaggcgtttctggtgctggttttacaatgcaaggacaacctgccgccaaggctggagcaaccttacgcgtaatcatggcagcgggaaaattccacggcgtaatagctgcaacgacgccaataggctgtttatttacaacaatacgagcatctggatatgggcttggaataatatctccatacactcgttttgcttcttcggcaaaccattcaataaaactggcagcatataaaatttcacccttggcttcagctaagggctttccttgctcactcgttaaaataaaagccaattcatccgcatttgaaatgattaaatcgaaccatttttttaaaataattgatcgatcttttgctgttttatttttccatagcggccaagcttctttggcagcttcaatggcacgctcggcttcagccttgcccatattcgggacagtaccaataatctctaatgtcgctggatttaaaatttcggatgtttgttgatggtctgcatcgcaccactttccagcaacaaaagcttgctgacgaaataaagcgagttcattaagctgcatgatcattatcctattaagatcttctgcattgatagtcgagcgatacataaattaaatagctcaccatcaactttgtattatggcataccaaaaattaatttaaaaaaattttcggtatgcccgaatgtttaaatgtatttagaaataataaaaaagcgttaagttaagcaacttattccactggttatcgtctccttttgccaatgaatcttgagtcccaccaatgaatgggtcatttttactcatgatgtattcagccaccaaagatagctgtttatggtcaatagacacaccaataatattacgaatcgaatctttcatactgtcctgatctttatcgtactgactgtacataaagtacggcgtaattttcccgatctgcttaacatttttaaaagtgtagcccacatctgcagtatagaatgttcctttgttcgcgacataatattcactgtcgtaagaacccatgagtgactgattagggttaagctggtcctgattagttacgtcatttttaccaccagtaagggtcacatttaaattgccataattggctttaccaaaaagtgcccatgcatgacggcgcccatcactcgaagcggctttattttcaatatcggatgtccaataggagccaccgagttgtgtggttaaaccattaattccaagatttatatcttgagtcactcggcctacccacatattcttttcttgcaaatcggttttattcggaacgtctgaactcacatagtttgcagtgtagcgacctgaatcttgggtagagcctgtgtaacttccaccatctaccgcaaaataccccacatcaaacttggttgctgtcggcaattcaaaatgataattcaaaccaagattatgaacatcttctaaacctgcggttgtgctcatacttccatataggctattaccccaaaaacgtcccggtccaaatggaatcggctgaacacctgccaccacttgatctgttttatttaatttgtaccctacataaccatcaaccaacgtagaaaaatcacatagacgatcatattgatagcaccgatattccgcatgaccaaataacggcccatgctcgtagtccagttttaactgcgcagcatcaaaacgaattttttgatcagaagcagactctccatagtgtttatcttgatagttagcgcgaacatagccggatacggtgagcttgccgtattcatcatcggtgtttccaaaacttatacctgcgtaactcggatagattacagccatcaatgctgtgcttagagccacttgtaaatagctttttttcattgtgggattcctttcactacaatgcttattgaggtaattttgcgtttaatgcaggtgcagaacatttaatctttcctagattaaagacgtaatacaccaccagactcaccaccaatccaataacccatgaaatatccgcatccggaattacatcggccagtgcacctgtgaaaaacgcattttttaagaacggaatttgtaccgcaatcccaatgaaataagccgtaagcgcttttgcattaaatttgccgtaaataccaccatcacgtgcaaagatcgattgaatgtcataagactttttattcacgacatagaaatctaataaattaatagacacccacggcaccaaaataaataacaaggcaaaaatcacattcaagaagaaactaataaagttacttgatgcccaaagcgccgttaaagtcgctagaactaatacaatgattgataacacgactcggatatttcggcttggcatccactgccctgcaaaagtctgaatagaggtaatacaagaaagaaccgcaccgtagaggttcatggcattatgaccaatgatattgcataagaacaaaatcataaggacatagccgaacaacccagtgcctgactttaccgcttccatggcatctgtggttgagccaatactaaccgcgatcgtaccaaatgccatcgcaaaaatggttcctaacgatgcgcctaaataggtaaagataaatggcttataaataccaatcgacttcggtaaatatcgtgaatagtctgaggtataaggcgagaaactaatttgccataccgcacacaaaccaaacatggcaaaccagcctttcatattgaaagagcctttggcaagtacatctgcattaatatgcggcaccataatcatgaggccgatgagcaacgaaccacccataaaccaagttccaattttattgaacttatgaataaagtgataaccaatcacgcctattgtggttgctgcaattgcaccaatcacggtcgcagtcggcacaggaatagcaggaacaacggtatgaagggttttgcctgacaaaataatgttagagatgaaaaaacctaaataaatgagggtagtaaacagtacaaccagcaatgccccataacgcccgaactgcgcacggctctgaatcatttgaggaatgccgacctgtgggccttgtgcagaggttaaagctaaaatcgctgcaccaaaaaaatgtccgcagcagatcgcaagcaatgcacttacaatattgaggttaaacgttaaaattgacattgcacccgtaatcacggcaagcggtgcaatattggtacaaaaccataatgtgaatagatcgcgaactttcccattacgttcagagggagcaacataatcaatagaatgactttcgatagcgaaagcattattgctattttcgttttggctcatatccttaatctctctttgaggaattcatttcctcaacatcaaaaaatctgcccagccaaagtcatttcaatatgactcggcttcatctttttatttccttttacaaacagctcatacttctgtttgtgttgttttagccaagaaaaaggtaaagccagtccgatcaatacttgattaagcatcgatacatctagttttacgttttcaactatttaaagctttaggcgattgctgagtttgactgattcattttttcatccttgaaattaaaatcccgatatattttcatgcctcaagtcatgatttatctcatgacaaatgggtcatcaattggctcatctgaggtacgtaaccaaactgttttggtggtggtgtaatctaaaacagcatttgcgccaccttcccgcccatgtcccgaaagcccatgtccaccaaaaggcgcaagtggagaaaccgcgcggtaagtatttaaccaaacaattcccgacccaatgactttggtcatacggtgagcacggcttaaattggtggtaaaaacgcctgctgccagcccgtaaggcgtactattggctttttgcacagcttccgcttcatctttgaaactatctaccgataacaccggaccaaataattccgtggtaatgcaatctgcttgaggtgcatcggtgcaatctaaaatggtcggtggatagtaataccctgctcgctcaatgcttttaccaccagtaagaagttttgcaccttgctggattgagcttgcaatgacttgctcaattttttggcgttggcgtaaggtacaaagtggtccaaactcggttgccatctcatgaggtaaaccaatttttatggtttgtacacgctcaaccaaacgctgaacaaattcatctttaatgctttcttcaaccagtaaacgtgaacctgctacacaactctgccctgtggccgcaaaaatagcagcgacctgagcatttaccgcactttgaatatctgcatcagcaaatacaataaatggtgatttgccacctaattcgagtgaaacttttgcaagattttcagccgagttacgcacaatgtgccttgccgtttctggaccacctgtaaacgcaacatgagcaacgtccggatgactactcagcacggcgccacattcaggtccgaaaccggtaatcacgttgaccactccagccggaaaacccgcttcatggactaatttggcaaaggctaacaatggtccagggccgtcttcagaagcttttagcacgaccgtacaacctgctgctaaagctggccctaccttcactgccgataaaaataactgactgttccaaggaacaattgcagcaaccacacctactggttcacgaacaatccatgcttgcatgtctgccttatcaatcggtagaaaactaccctctaatttgtcggcaatacctgcatagtagcgataatattcagcgacataggcaatctggctcgatgtttcacgaataatcttgcccgtatcactggtttcaatttgggcaagttgcggtgcagctttttcaattaaatcagccaacttatagagcaatttaccgcgctgggaggccgttaaacctgcccactccggtgcttttaacgcctgagatgccgcttgaactgctcggttgacttcatcggttcgagcttccggcatgtgtgcccaaacttcacctgttgcaggattaatactttcaaacgtcgctgcaccagattcaaactgaccattaatataaagctgaaaatctgctgtcatgatattcgcctctatgcaaatgccggcataacttcattgatcatacgttctaatgatgcttttttacgctcaaagctcatgcccgtatcaatccagaaagaatattcgttatagcccattgcttcataagcttttaagcggtcaatgacttcttgggcttgtccaatcacgttatttttgcgcatcgcctcaggtgtataaaaaggatgtgcagcaatttcttcagggcttaaaggtgcaattaaaccttgtttaatttcacgctcatttttaaaccaagcgccgaagtagttatagaaggtattgatttcatctgctgccagttgagcatcttcttcactatctgccacataggtatggcggagcaacataatttccggacgcggtacatcactgaacttttcacaagctgcattgaaatgtcccatgagcttttcaacttcttcgtcacctaaatgtaacggcgttacctgtatattacagccattttgcacagcaaattcgtggctatttggatcacggacagcaacccaaattggtggatgcggttgttgaagcggttgaggcgccgaagtcgtttttggaaactgccaaaattccccgttatgctcataatcgcctttccaaaggtttttaattgcgggaatcatttcacgtaaacgctgacctgcactccatgcatccatgcccggaaccatacgttcatattcaaacgaataagcaccacgagcaataccaatatctaaacggccattggtaataatgtcggtcattgcagcttcacctgcaagtttaatcggatgccagaatggcgctaccaccgtacctgtacctaaacgaacatttttggttttattcgctaaatcgaccagatttaaaaatgggttcggtgcaatggtaaagttcatggcatggtgttcgcctgtccaaaccgcatgcataccgccacggtctgcaatttgacaaagctcaatcatttcatcataaagctgcttctgggtttgctgatcagaaacacgttccatatgcacaaataatgaaaaacgcatgattaaacttcctctttaacgatttgacgaactgtacctgttgtctgatttccgtaataaacaccataagttttcaaatggttttctttgcgatagcgcatcagcatactttctaaagcactgtctacaaactcaagtttctcaagatcatttaaatcgacaaactgacctttagtggcttgagctacgggtgtgttgcataaaaatgaaatatattgctgctggttttcaacgttttcatatacagagtaaatgaagttggcagaagcatctggctgatattgtgcaaagattttctcgagcgctttatctgcaccgtctttatctaccatgacatgcggaatagtccatttatgatcggcagtttcttcaagtaaaatggtattttcatgtccaataatggcactcatcaccactttagggccagagatcacctcggcagaaagtttggctggtgtgaaatatccaccacgataataaccaagacctgcaaaaccggtcgaagcaaaatcttcaactttaccaattaaaatcgcatggtcaccagcatcgacaacttggtaggtagtacagtcaaaccatgcactgacatgatcgatcagcgggttctggcaagcgctttttgaccatgaaagatttgcaaaacggtcttcgcttggacgagcaaaagtatttgaaacatccttttgctcttctgccaaaatattgattgcaaaatgagtggtatttgcaaagttatgataattgcttgatgtcttggcaatactcactagaagtaaagctgggtccaaagacaccgaagcaaaagagttcgctgtaaagccaagtggcgttccatcttctttacaggttgtgaccaccgtaacgcctgtcataaatgacccgaaagcatcacgtagttcacgcattttattaatcgtatccatttcactcattgttatattccttcagcaatgtgtggcaaattaaacgctggtttccaaccacgcttgcattgcattattcactttgtcaggtgcagttaagttcaccatgtgacgttcattttcaatgacaattgcagtgccatgctttgcctgttttgccatttgtaatgccatttccgctgttgaattcggatcatccgttccggtcaacaccaaagcaggacaagtgatctttgaccagtcatctgcataggtttcatcgccttgtgcaaacgcagaatacgcagtggtataaccagacaagtcgacattttcgagccaagttttcactttggcagcagctatacgctcgacttcactttcaccaaaccagcgttgtagcggagtttcaacatcaatacggcctgtttttaactcttcagctctttggatgactgcatgacgtgcctgtggtgtccgtttatacacaccattgagtacagccatccgtttaactaaatcaggacgggtaacactgacgcctgtagtaattagcgagcccattgaatgccctgctaaatttaccgggcctaaatttaaggctgtaataaattcgatggtccattcaacaaaatcttgtaattttgcgtctgccggtaatttggtactttgaccatgtcccggcatatctactgaaatcacatgataatgtttagaaaaatattcaatttgtggataccatgccgcagcttgcattcccactccatggatcagaaccagaggctctccttcgccttgctcaaaatagtgagcaatacggttatttgacagctgcagggtttttgacatcatgacctaactcttccaaatctttataacgatcaccaatacgatgatgtggtcgaccacctgtcgctgcaccaatcacaacaaccagttcgtcagcagcaggtgcatctggaattgcaaattgcaatgttaagtaatgagaacggcggccttcgtcatttttatccatcattggaattaaaatcggtgcatttgctgggccacgggtattgttaaatgccaaataagacttcgcgccaacagcactacggtaagtattaccaaaatgtaaggtgtgaattaaagctgatgcatgctcaagttcaccatttaagcccaccactgcacttttaccaaaagcttcaacggcttcgcccgaaccgacttcatcaagaataagcttggttaaatgctcgcttaagatcggcgcaatgcgacgaatttccggtgttaggttttctacataaccttgccctgcccacggatttttaattaccgctgcggctgccaccatttttaaaggcttagctgcttctttgccgccatctacataagtggtttctacatgaagtacagttttacgtatgagttccattgctcttccttgcaagtaaattatcttgtcattcgtattatggtataccataatacatactgaaaaaaaagcaagagtttgctatgctaatttttattgaaatacatgtaatgaaactcaacatgttaaaaaacaggaaaatttaattacctatgaatcttaaaattgagaacccgcccgtaactttacgagagctgtgtttagataaagtgcgtaatgccattattacgggctatttcccttcaggaaaaagattggttgaaagaacgttatgtgaagaacttggcgtaagccgttctgtagttcgcgaagtgattcgttatttggaagcagaaggtttagtcgagattctgccaaataaaggccctattgtttcgctacttaactgggacatcgcttcacaaatttatgaaattcgtcttttgttagagcaaagtgctgtggttgactgcactaaaaatctagatgaaaaaactgctgaaaaattaaaacttctattagaagatcttaaagctgcgtttgccgccgatgacatcaatctcattattgcgacctctactcggctttatgaaactatttttactactgccaatcaccatattgcttgggaagtggttcaacgtttaaacggtcgaattagccgtcttcgtgccatgaccatgaaatcgacaaagcgtgaaatttcaggttatcaacgtattaaaaatatgtgtgaggccatttatcttcacaaagaccctgaaaaggcaaaacaagctgttgctgaacatattgctgaagctgctgctgtcgcaaaaaatattttagatgcgtgaaatcacaaattttaggaaaaggtaaatagacctttattgaataagttatagggaaatacgatatgtctgcgtactggattgctcatgtcaccattcatgatatggaacaatataaacaatatatggccactgctccgcaagcttttcaaaagtacggcgccaagtttcttgcgcgtggcggtgcctcggaagtcttagaaggacaagagtttgaacgtcacgtggtgattgagtttccagatatggaaactgcacgtgaatgttatttttcacctgaatatcagcttgccaaaagtaaacgccaaggctgctgtgatgtcatggtgagttttgttgaagggatctaaattgctgaattgatttctcaacttgagaaatcaattctattttaagttgttatatcagcgagcttatttatatgttttaaataaaccttataaaaacctcaccattaactcatcgttcaatcgaaaaatttcaagcaaactaatcagcttcttcttttttagaagaaggccccaaagccatactcgaaaatacgccatcgcgataaatccatgcatgtaataatgcagcagatagatgaccaataacgacagcaaataataaccaagccaaaattccgtgtagagtacggaaccaagcgtaaagcgtagagttggttggtgctataggtggaagatcccaacccggaaataaagtgacaggccaattacctgccgatagcgttgcccatccgagcaatggcaaactaaacatcaaaatataaagtagccaatgtgatgcatgagcaagaaacgcttgccagcgtggtacagacggcggcaaaggtggaattggataacagagtcgatttattaatcttatgatgaccaatagtaagattgcgattcctaaaggacggtgaatatcaattaaccacggacgccaagtcattgaggtggtcattcctaccccaataaatagcatagccagaattgctgccgccataagccaatgcagtattcgcgcagtcaaattaaaatgacgtggagcattatcgttagatttattttgcattgttcatctctcctatttgcccacggcatccgttgctttgccaaatccaatttcacgtaatcgagcattataagactgtgaatagatcgccgctcgtgctgcgagtactgggtcatctgataactcaattccgggtggcaccaaagttgggtcaaagttaatatcacgacaagcgccatttacctgatcagttacatttttgacttctaatgttccggctataacttctttacggtcttttggccaaggctgagatgggtcattcactgggtctcctggctcggcaagttgcaatactaagtcccaatagagcggcccttcagccaaacgttttttgatgtctttaaataagaaatcatgatcagcttgatcacgttgttctttcgtcagactaataaattttgaatgaggacgcatagaccaacggactggctgttcttgtccattggctgcccgcaatataaaggcatttacgacataaaattctgcaccgctgaaactaccagttaatggcatcttggccttttgctcaatagacttacgcgcttcgggatattcttttaaaaacgcctcaacaagggctggatcaggtttcccagtagacggaactggtttaaatgctttttgctgcgccaaaaaaccttcagcatttcgagtcgggaaataaggaaagttgtttaatttcatgcgccactgcgaatgatcggctggagaaagtaataaagccatactcactgttgcggtagaattatctgccgcatgcgggttaccgcttccaatagaaaatcggccaattgctggtatatcagacttggcaaatacagtggctttagagagtgctgctgccgcaccattactatggtaagtgccatcaaaacaaatacctttaccatgtgctcgtcgatatccgggatcaaagttctttaatgtgtcacccaaaaaagttttggatgttgttcgatgtccaaatagaccagcggtccaagcaaatgccaatactaaagcgcctgcgattacagcaatacccacgaatcgcagccagtacttctttagcgttttaaaattcaaattattcattcttcatcctgtgtaaattatatagctgcatttataaagaaaagttttatcctataaaatacgcaggacttcttatcctgtcgtccttttgaaccaagaaaataatttacgcttaagcttatttttttataggtagtagtaaaacagggtcttcaatatcgtaaccagtttcttctggaacccccaaatatttaacgataaccaacctcttattttgtttaggcacactataattttgggaaatttttattgctttgctgtaatgaaccgcaacatgggtcttactttgtaaagacggcgattttacaacatattctgttttatattgcgtgatctttcctgaaggatcaaaccaagacgatatctgattctgatgagtttttaatgtttgaatttttacagtcttactattacttacgatcaaaggagttaaattccttttaattttattaagtgccttattaaacgctgtactatcttgatcataatcaatcttatgtgtttttggattgatatagagagatttaacttcaatcagtttatcaggcgatttactatttaatagataataatatagttgtggtaggcgtcctcggccatcttcataatgtcttaatacataaagtttcttctctttttgctgatagcccaatacttcaattttttgtccaccacccactgtcgcataggtatgtgcggataaggtaagaatcgtgctaaaagttaaaaattttagaaatttcattagttcatatccttgtgatctgataactatattgtataaataccaatcagtttaaaatgacacttgagtaagtgttacttgctgtttttatattcttttgtacacaagcagcctttctaaggaggctttatttattatttctctcccccttcaaaacaactcgtctagcttttacatataagccgtcatagaagaacaggctagcacttgctagcatcgacatgagtaaacatacatggactaaaatttctaacaaaagagtttaaaaaataatccaacatcttttcccgctcgattgccccatctgagcttaaaagctgaatgattgtgccctccaccatatatacaaatagcttggcatcggtaaaagaagcatccgcgtttagcactctaagctgactataaatttcatttttgagccatgttctatagcgcattgcagattgataagcgttgggataactatttttaatctcaaaaatagctttaaataataagtaatacggcccttctaaatcggtatgtaaataataaagcttcttaagtttatctattgcgggagtgcttaagtcatactcgaccattgcgaccacttgctcttggagcttttctttttgcaccataaggcagatttcaataagcctttctttagagtgaaagtaattataaaaagtcgctttcgtaatttctgattctttcactattctgtcgacgccaataaggtgaaatccacggtgatgaaacagatcaattgctttatttacaacatataaggtacgtgttgggagagctaaatttggcatagttttaccgttataaaaatttttgttgtatgtagagataaaaaagcctgtgccctttttgggagaaaaaaaggcacagcaaagccgtaaagactgtgcttggcacatctcaagttttgttgttgctgagttttaagtaaaaatgactttaagcctgaaaaccttaaggcgttcaagctgttttattttttaagttgtgtcgttatagcttttggcattgagagccaagaaataatggatgtgcaaagccaactcctttttattgggagttctgccgacatgaatagaaattatggtggcagaacgagaaagggttcgcggactggtttcgactccagcacacccgaaggtgtccctctcccgtcctaccgctacgggaggagactgggagtttacacataagactattcctcagaagaaataatcctgatgtggtcgaaaaaatcggtccgcgacgaccggctggcaatgtggccagcaggcaaagaatagtgcccaacccttttacagtcaagcacgtaaaatgccatttgttttaaattaaatcattagaaaagtaaggctaaataatgggtgggttattgttaagtgggggttgtaaactagaaataggatcaccaataaatattgatgggaagtcatgcctaaataaaatacagcaatatttagctacccccctctttcaaatgatcagcattatatctctcaaattaaatagatatttaaattaattcttaatatcatttagaagttatcggaatactttaactgctttatcgaagcataaaaatataaatttttaaatatgactaattagaaaaagctctatattgatacaacaataaaaatgttatattgtcaggcaaccaaacggtcagcactaactcattaatgctctcactgttgtaaacatttggttcgggcgaaaacacagcaatgtgcttgtcaactgaaccatgacgagggtctggctagtcttatcaccgatgagatgagctatgtccatgttgataacagtccttttgctatctttacttggaaggtacttggtattttcaagatggagggcgtgatggcgcaggcggtttggcgatataatatctatcgaaaaattcaatggctaattcagtttgccgtgataattacaccagtaattattcatacaaatcaattagttatgtgtgttttcttggagattattgtattgttgtttgatatattattatggtataatggaagtagtatgtcgcaagaaaagatggcaataaattgctctcactgttgtaaacatttggttcgggcgaaaacacagcaatgtgcttgtcaactgaaccatgacgagggtctggctagtcttatcaccgatgagatgagctatgtccatgttgataactgtgcccctttttaaccattatgagatagcttcacaagtacgtaatggaacagaaggtttttattaaaaatgttattttatgattttttaaaagaaggttttgatttttacttccaagagtttaaaaagaaaaatataaataattacgataaaaaatatcataccaattatatttcaattaaagagtttgaaaaagatattaaagttaattcagaaaatattttcaattctataaaaaataacaattataaatttcaatctctataccctatagttattgaaaataaaaaggaattaaacaaaaagccacgtttaatttgcataccgacagttagagatcgcctaatacagatgatcttaatttattatatttcaatacatttaaaaaatgaattagctgttcttaaatcccaagatttttctgtttctggtgtaggaattttaaaagctcgtcaaaaagcaaaggatttgagaaatactaaaccctatgtattaaagacagatatatcttctttttttgacaatattgatcgagcaaaattattaaatgagataaaggatgtaatgccaccagatatactttatttattccagtcaattatttattgtgatccaagcattccttatgaatataataaagattataaaaaactaatttactctaaattaaggaaaggcgtaaggcaaggtatgcctatttctccactccttgcttctttctatttaaatgattttgatgaatggttaattaagaagaaatacaagcatgtacgttatgctgatgacctaattttttttcttgactcagaaaagcaatgtaaagaagtctatagagaagtttctcaagagttacttaaattaaatttaactttacccacacttgaagaaaatacaaagactcaaattatttctcctaaagaaacagtcaattttttaggtttagatctgcgttatgaaaatgaaaaatataattggtatattccaccccatgtaattgaaaatgtaaaatataatttattacatctaactaatattcaaaataatctcaaaatgaaattaaatttctccaaaactataagtcgtatggaacaaattatttctggttatcaacattgttatagtgatgccgattctttaaacttaaaagatttcaataaaatactaattttagaaaagcaaaaagctattaatttactttttaaaaatttaggaattgatattagcacagtacattcacaatatttaaaatatttattagacaattaaatatttaattgtctaatatttttaaataccttatatttaatttatatacacacattacaatttcctacctattttaattaagcttgtagccaaattagaagggggtgatttactaaaatgtatatgaatatgtggaaattcaattttttctttattaaaacagcattctttgaatatttttttagattctttacatggacacatatcattttcgtcaacagtattaaattcagaacgatcaattaattttttggttttaaatggcttccaataatcaaaaggagattgtaatctttctgatataaaatcaactgcgctataatcataatctagcattggtatacatgatttttggacaggattttttaccatagaaatttctttcagctcacagcccccatctgctacatgcacacacaatttaccattatataatttaccttttttatgaatacatttattccttggccgaataacatgcccacatattgaacatgtatactgctttattgttgcaccaatactaaagaaaattttgtaaggaaataacgattgccaactctcaacaatctctttgtagaaatccaacttatatttttttataaaatcttcgtctacatttttctctaggaaagaaatgtctatttctatcctttctaatagaacccaagcttcataatgcttcttatctttcaataaaaagaaagttttaatatatctatctttaattataagtatagttttcaacttccacaaaaagttagataaatcttcatctccttgttcctgaatattttctaacagtttactaacttcttctaaagcaactttatagtgactttcattagtagaattgcttagtaataaagtatctatattatttagcatgtctattaacttcattgtctctactcaactcattaactttatctagaacactattaatatgctcagctttaccacgataggctaccttgatattcttatcgttgttcttttcaattataatattaacctctatttcatcatcacttttagcctgcaattcatttgaaatataatcactcataacatttgtgaatattggtacagctacttgagctactaaaaaaacacctaaccaatgtgcttttgaatgtaatgctaactcttgatactcctcatcaaaagcaaaaagttcaacttcattttcacctaattcttcttgtaaataagaaaaaatatcaattgtaccagtatgaaatgcatcattctgtctaacactaggaagaattaatacactaacatccctatttaaaattaaaggtttttcatttttcaaagttgaaaagtttaaatctgtttcttccaccttaagcaattgatctgaaatcatttattcccacctaaaaatttaaattttatctgaaactttctttcaattatttctatttaatataaaccaaagctaagtaagataaccatacttagctttggaaaataaccagcttattcaactttattattatcttaatgtatttttgctctggatctaacaatcaaataactttatatcacggcgcaagcctgtaacacgtagatgtaaacaaagcgactctattattcaaaccgtctgttatcaacacttcataatgcgcaaattttttactacttccgaccttggttgccgttgcaaataacaccctatctttcgcaccgctcatatagcgaatatcagcttgtaggccagtatatggcgcatcccctgcattacacgccatcgcaaaagcgatatcggctaaagaaaatatgactccaccatgtacaccgcccaaggcattcatgtgttcgtcttttacattaagcttgcaacgcgcttcatcaaaactgcgatgcagtacttctacacccaatagctctgcgaattgatcaaccgctgtggtttcatttttttgcacaaacgtctccctactcgtgcgagtattccttaagtgttataaacctatgtgtattgaaatcgacttgttaagagccgttaaacgctatcttgtttaatctgatagtttgaagaactaaagtccttataggtcaggcggtcatccaactctgaagttagaggctgaacttcttgcattgagtttaagcagcgctgtgcaagttcaatgtattcttgcgtgcctctggttttccactttttttcttgttctgataaatcacgtgcaaccttggcagggctacccattgccagtacatttgccggaattatatctttggttttgaccaagctatttgcaccaataatagtgttttcaccaatttcggcatagtccaaaattacgctgttcatgccaaccaaaacatttttaccaatgcggcagccatgcaaagttgtgccatgcccaatgtgccccatttcctcaactaaagttacgctttgcggaaaaccatgtacggtgcagctatcttgtatattggcattttgcttaatatgaatacgaccaaaatcggcacgcaatgaagcaaatggtcctacatatacgcccgcttcaataatcacatcaccaattaaaacagcggttgggtgtacaaaagcgtctgggctaacgactggaataacaccgtcaatactataacaaggcatgatttaacctctcatttgtcgccaccaaacctccgaaacggcgccaataatgtgctgtggcatttggcattggtccttctgctgttgcggcaacagacaagaagtattcatccgcaggttcaaatacttttttataaatattcattgataacgttcgcgcactaatcgcaggccagtcagttggcaacaactcaagcggtaatgcagggtctttcaataaaatccgtcgataataatgaatcagcaaagttcgaatttgaaaggcctgaacaggttcgagttgttcgttttcctgcatcagcaacacgccaatttctctaaaaatatcgagaaactgtagatatctttggcgtaattcatcgatgggccagttggttctgagcatacgtccaatggtatcgaccgagttattaaagagctgcaacgtttcggctttaaacaccaccacttgctcactcatatttaagtcaaccaacaagcgttgcagctcaatacggttacaacccggatacgccattaggtttgtagaaatattggcaaatcctaaccattcgagttctttctttaacaacgctttattttcagtatcgaggctagacatcagaataagatcccaataatggtcccactctttcatctggtcgttataaatgcgttgctcggcctgcaaataagtcgaacggctcgaatcggtaattcgataaaaactggttctgccgattttatctgaacataaccaatcatttttaactaaacgaaaaacagaggttcttacagcacggtcattaaaaccaaacagctctaataactgaatcaggcttgcaagactgatatttccaccccgatgaagtactgaatctccaaaaattgtcgaaataagcgaagttccacttaaggtttcattctttacaacagaatcaattatttgctgtatttttgcactcatactcatgtcttggcgtttagtttcagggtatagattctataccctgaatgatcttgatgttaagcaatctgacgcatatcgattacccgctttgccttaccttccgaacgaggtaaggtcgcttctgtcacaacttctacagtaacgctaatcccaatcatggttttaatgcgtttcatcaactcctgagcaagttgattggcctgtatagtacagttatgacacatctctgtacgaatatgcaaagtatccatatggccttttttagtcaccaaaatttcataatttggaactaaatgtggaacttgcaaaatttgctcttcaatttgggtcgggaaaacgttcacaccgcgaataatcagcatgtcgtcgctacggcccacaattttatccatcttacgcattgccagattttcacccggtagtaagcgggtcaaatcacgagtacggtaacgaataatcggcaagccttctttggtaatggtggtaaagactagctcgccaagttcaccatctttacaaacttcacctgtttcagggttaataatttctgggtagaaatgatcttcccaaatggttagcccttcgccttcacctaagcactgcatcgcaacacccggacccatcacctcagacaaaccataaatatcgagtgctttaatattgagacgttcttcaatttcacggcgcagttcgttggtccacggctcggcaccaaaaataccgacttttaaagacgtattacgtgcagtaccaaattgttgttcgagtttttcaataatactcacgcaatatgatggcgtaaccataattgcagtcggtttaaagtcttgaataagctgaacttgcttttcagtttgtccgccagacattggaataaccgttgcacctaagcgctcggcaccataatgtgcacctagaccacctgtaaatagtccatagccataagccacctgaaccatatctttcgcggttaaacccgccatgcgtaagcaacgcgcaacaatgtccgaccaagtattaatatctttttgggtataacccaccacagtcggtttacccgttgtaccagatgatgcatgtaaacgcacaatttgctcttgcggtacggcaaacataccaaacggatagttgtctcttaaatcctgtttggtggtaaatggaaacttcgccagatcgtctaaagttacgaagtcgtcaggatgcacacccgcttcatcgaactttttcttatagaccggactattttcatatacaaaagtcagggtttgttttaaccgtttagtttgcagctctcgaagctctgcaagtgttaattgctcaacattatccattgtaaggctgtccatcgcctctctcctcattatgtaattttaaaaaccgtctaagttaatttaagttttccaaaatcagtgcgacaccttgtccaacacctacacacatcgtgcaaagtgcatagcgtccacctcgtttttttagctcacgtgttgcggtaatcactaaacgtgtaccactcataccgagcggatgtccgagtgcaatcgcaccgccatttgggttaacgcgttcatcgtcatcttttagaccaagttcacgcatacaagccaaagattgggctgcgaatgcttcattcagctcaatcacatccatctgatctagcgttaaacctgtttgctttaaaattttctgcacagccggaacaggacctatacccatatatttgggttcaacccctgcacttgcaatgccaattacacgtgctaatggttttaaaccatgtgtatctgcaaattcacggttggtaattaacacacatgcagcgccgtcatttacaccagaggcatttccggcagtcaccgaaccaccttcttttttaaacggcgcttttagtttagcgagtgcttcaagtgtcgtttcacgcggatgttcgtctcgattaacaacgttcacgtttttcttacggtctgtaatctcgacaggcaaaatctcatcgttaaagaaaccgttttgttgtgccgcagcggttttttgttggctacgcaatgcaaacgcatcttggtcttcacgactaatctgatatttttcagctacattttcggctgtttcgggcatgctgtcggtgccgtattgcgctttaagttgcttatttacaaagcgccagccaatggtggtgtcataaatttcaggtgtacggctaaacgcttcggtcggtttagcttgtacaaatggcgcacggctcatcgactcaacaccacctgccaacacaaattgtgcttcaccagctttaattgagcgtgctgcaaggcctactgcatctaaacccgaagcgcataagcgattgacggtcatggctggcactgtatcaggtaagcctgctaacagtgttgccatacgtgcaacgttacggttgtcttcacctgcttggttagcacatcccaaaaatacttcgtctaccgtattccacggtaggttcgggtgtttatcttttaaatatttgatgggtaatgcagctaaatcatctgcacgtacagcacttagggcacctgcatatcgtccaattggggtacgaataaaatcgcaaattaaaacgtcttccatgttgactcctgattatgcaaattcggtcatatcacgtgaatattgagtagcaatgttttgggttttcgctacatattgcttgaggtagatactcgcgcgatatttttcctctccatacagtgcatataagttatttaaggtttggagcacataagcgccacccatttgtgtcaaccactggtaagggcctttaggataattcactccatatttcatggcattatcaatatcttccagactcgcaactccatgtaaacttgcttcgcaggcttcattaatgagtaaagcgatggtacgtaaggttaacagtgccggatggtctttaatccacatcacgctcataccaaactgtgcaaagtaagcctcaactttagccagatcatttgtttcacaaagctcgttatgactgagtactaaagcctccgcctgctcaaaatcatggtgccaatccattaaaaccactttacggcttaggtaatgaatattggctgactcaccttggcttaaacgtaagtcgatatcatcaatttgaaggatattgtcatcactcgcagatccgctttttaaacctaaacgcgttaaaaaagcaggtagctgagaccaagtcccttttagctgaatatgggcatcgactggtttggcaaccacagcttgaggctgaaatgtctggtattgatttttttcgttataggtataaaagccttgttttgacttacgcccccaagcacctgcatcgaccaattctttttgaacgaggcttggacgatagcgtggctcgtaaaagaactcttggtaaacgctttgggttaccgaaaagttaacatcttgcccaatcaggtcagtaagttcacaaggccccatcgcaaaaccgccacattgctttaaggcataatctagctggtcatagctggtgacttgttcttgcagtgctctaaagccttccgcataaaacggccgtgcaattcggttaacaataaaaccgggagtcgacttggtgagtacaggaattttcttccaattcagcatcaagttttttaaagccaaacataagctgtttggggtttttaagccttgtacaatttcaaccagtttcatgactggtgcagggttaaaaaagtgtaaacccactacccgctcagggtgagtaatgcccgccgaaattgcagtcactgaaattgaagatgtattgcttgcaaaaatggtttgcgcactacaaatttcagcaagttgcttaaataaagactgtttaacttcttttttctcaacgactgcttcaatcaccaagtcagcatcacgcagcgcttcaatttgattgaccactgttaaacgcgctaaggcttcatcagcttgctgctctgtgagcttgctcttttcaaccagctttttaaacgtctgccctaaaccttgaacggcttgttgcgctttttgagcatctagatcatataaaacggtcgtgtgtccattaacgatggctaactgggcaatgccgatgcccatagtgccagaaccaatgacggcaattcgggcacgagataagtctaaatctgtcatgcttagcgccctttaaaatttggttcacgtttattcataaaggcttgtacaccttcacgataatcttcggaacggcctgcaatgcgttgtaaatctcgttctaacagcatttgctcatcaaaagtgttattgcttgattgatgaatggcttttttaatgagagatagaccaaatgtaggctgtttcgctaaacgttcagcgagttcagtcacttttgttttaagctcggcgtcttcaaccacatcccaaatcatgccccattcttttgcagtttctgcggggagcttgtcacctaacaacgtcaaacccatcgcacgcgcatggcctacagcacgtggtaaaaaccatgtacccgccgagtctggaaccaaacctaagcggcaaaatgcttgtacgaagtttgccgatttagctgctatcaccaaatcacatgccaatgcaatatttgcccctgcacctgctgccacgccatttaccgcgcaaatgacaggctttggcatatttacaatcgttttaatgagcggattatagtaagtttcaatggaatatcctaaatctggagcttcagcatttgggtctactacacggtcgcctaagtcttgccctgcacagaagccgcggccttcgccactaatcacaacacatcgaacatctggatttttagtccactggcttaaaacctcggccacttcacggtgcatatcaacgttaaagctattcagtgcttttgggcggttaaatgtcaggtagccaacaccatttttttcttcagcaataatattttgatagtccatcactcacctctaaacactggctttcttttctcaaagaaagcattaatcccttcgtttcgatcttttgtagccgccagccagacaaagttttgacgttcaaacttgagtccctgacttaatgttgtttcatgaatacttttaattgattgtttaatcacgcgaatcgctaaaggcgcttgtttggcaattttggctgcaagttgaaccgcatattcaacggttaattcggtcggaaccacttgactgcaaatgccatgttgctcggcttgttttgccgaaatcatttcacctgtcatagcccagcgcatggtgagttgttgtccaaccaagcgtgctaaacgctgtgttccgcctgcacccggcaacatcccaaggccaatttcaggtaaagcgaatcgggcattttcaccgcaaatcaccatatctgaatgcaaaaccaactcaaacccagcgcctaaggcatagccattcactgctgtaatcagtggcttactaaacgcatcaattttttgccaaagcttcgggcgaatatcgagttgcaaagacacggcgtccattgcagccaactcactcagatctgctccagccgcaaaacactgagcgttacccgttaaaaccaccgctttgacttgagcattatgttcagcttcttcgagcaactcgcataaacactgtaatgttgcattgtttaaagcatttcttttttctggacggtttagggttaataacaaaacaccgtcagcagctgtactggctttgatcaactcttgcatgacagcctctattcatcaaaactcaagcgaacatttgagccttttggtaaggtctgacagctcagcacatagcccttttcaacttcatcttcttcaagactatagttaaggaacatgtcgacttcgccagaaagtaccttacaacgacaggtcgcacacaccccacctttacatgcatacggtaagtcggcacccgcacgcaaagccgcatcaagaatactttcatcatcttgagccacagaaacaatcagttcacggccatctaaaataatgtttactttttcttctttacggtttgcatccgcttcaacactacgtttacgcgcttgccctgtatggaaacgttcggtgtgaatgcgctctttggcaataccaaagttcggtaaagtattttctacggcattcatcatttcgtccgggccacaggcaaaaacatggtcaaaatttgtttcaagcacttcaaaatcaaaaagttgcttaagcttttctgcatcaatacgaccgttcattagttcactatcgttgaactcacgagaaaaaatattgataagttgaaagcgttctttgaactgatctttcaaatccataatttgctcggcaaacatggtttgtttccatgagcgattgccatagagcaaggtaaagttagcttcaggttgttcaaataaaacttgtttaataattgataaaattggcgtgataccactacccgcagcaacgcctaaatagttttgtccgcccatcttggctgctttttgaaaaaacacaccttgtggtggcatgacttcaagcacatcgcccacttttaaatggtcatttgcccagtttgaaaattgcccttgatcaatttttttaaccgcaatactgatgtcttctttgcccgcatagctacaaattgaataacaacggcggatttcacccgcttcggttaaatggcgaatggttaagtgttgacccggttgaaattggaattgttcttgttgttcaggtacaacgtcaaatgcaatacaaattgcctgatcggtttgcggtgtaatactttttacttttaatggtacaaattggctcatggctgatttccttatctaaagacttaaatacatttgaagtaatcaaaaggctcaagacagtcctgacatttataaagtgctttacaggcggtagaactaaactctgttaacagtcgggtatgtcggcttttacaacgtgggcactcgacaccatttgttaagtgaacatgagttccacattgatgcgccaacccttcaggtggtgcaatgccataaacttgcagtttctttttccctgcttcagacatccagtccgtggtccatgcttctgataaatcgaccatgactttgaccggtgtcaaagcttctgcggtaaatgcctccacaatttgtgctttgagcatatccgttgctgggcaaccgctatatgttggagttagacgaacaataatttcttgttgatcgttaatctctacaccgcgaatcatgcccaaatcgacaactgataaaaccggaatttcagggtcacttaccgtttgtagaacgtcccaacattggtcgatgcaatgacgaatcatttgcatggctcacctccttgtcttaccaggtcattcccggataagttctttgaatacattgcatttcagccaataaataacccaaatgctcggtatgcaatccttgtttcgcaccacggcgataagcaccgttcacagcaacatttaattcaaaacgcttaagctcatctgcaatggtttggttccattgttctttttcatttgaaaaatctggaatcacgccttctgcaactagtgctttttcgtctgcactcagttcaaataattcagcggtaaagcgccataaattatctaaaccgtcttgtacacgttgatgcgcttcatctgtgcttaaacttaaacgttccatccagcttgtcgaaaagcgaatgtgatacttcacttcttttaaagatttgacagcaagcgcacttaattcaggaagtgagctttgcgctaaggccgtaaataaatgaagatggtaatggtccatcaaccattggcgtacaatcgtttgtgcaaagtcaccattgggttgttcgcacaacaagaggtttaaaaactcacgttctgtacggaaatacgcaagttggtcttcatcacgcttagcttcatcatattgaccagccaacgttagaaagtttcttgcttgacctaacaagtccaagccgatattggctaaggcaatatcaatttcaagctcaggtgcatgcccgcaccattcagccaaacgctgagataaaaccagttggctgtcgccaatatgtaataagaatttagataaaactgaatgattcatttgccattccccttacatgtgctcaatgccatctgggatatggtaaaaagtcggatgacgataaaccttgtctaaagaaggatcgaaaaattcagctttttcatctggctgtgatgacttaatcagttctgaacgaaccacccaaatgctaattccttcattacgacgcgtgtaaacatcacgagcatgttgcagtgcaatttcatcatcaggtgctcttaagctgcctacatgacggtggcttaagccttgtttactacgtacaaatacttcgtagagcgaccagttgtttttatcttccattttgatttcctcaaatttttccataaatcttgttaagccactttgttcgcttcaagctgctgttttttcgcgtagactactgctgcatcacgaacccatttgccgttttcccatgctttacggcgtgcttcgatacgctcgtgattacatggtccacgtccggcaatcacttcattaaattcgtgccagtcaatctcgccaaactcatagtggcctgtttcttcattgaactttaaatctgggtccggtacttccaagccaagttgcaacacttgcggtacagtgttatcgacaaacttttgacgtaattcatcgttactaaaacgtttgattttccacgccatgctttgtgcgctgtttggagaatgttcatcgcttggaccaaacatcatgagtgcaggccaccagaaacgattcactgcatcttgtgccatctgtttttgttccgctgtaccgtttgccaaagccatcatggcttcaaaaccttgacgttggtggaaactttcttctttacaaatacgtaccattgcacgtgcatatggcccatatgaagtacggcaaagcgcaacttggttcacaatggctgccccatcgacaagccaaccaattgcagcgacatctgcccaagtcaaagttggatagttaaagattgatgagtatttcattttcccattaatcaacttttccatcatgtcatcacggtcagcacctaaggtttctgccgcgctatacagatataaaccatgacccgcttcatcttgtactttcgcgagcaaaactgctttacgttttaaagtcggcgcacgagtaatccagtttccttcaggcaacatacctacaatttcagaatggccatgttgcccgatttgacgaatcaatgttttgcggtaggcatcaggcatttgatccttagcctcgatcgtaatttcattggcaatattttgttcaaatttctggtaattgttttccattctttcattccctgtaggtatcacccttaaatctatttttcgatacacaaaaaacaaagtcaactaatttttttgtatcaaattaaatccacaacaacaaaccaatacaagctattgaaatttatataattaagttaaatgtaaaaaacttttttacttttaaaaatcaaaataaagttgacttttatacaaattaatctgaaattatgaatcatatttttgcaatttttataattgatgtatcaaataaaaaaggagtttggtcatgcttgaacaagcacacctagaaggaacctcaactgacacagattttcagcagtctgagcatcaactgcctcatcttgcttcttatgtctatggaacatggcattcgtctgacgaagaattacgtaccgtttatcatgccattacaggtgaagcgatttatgccgtaagtagtcatggcgttgatatgaaacgtgttgttcaatatgccaaacaaaatggttcagaactggctaactggacattccaccaacgtgctaatgcgttaaaacaaattgcccaacatttacttgaacgcaaggaagacttctacaaacttgcttatgccacaggcgcaactcgtaaagatgcgtggattgatattgaaggtgggatccagacattatttgcttattcgagtctggttcgccgtgaactcaatgatgaaaaaattattactgaagacagctggattcaattatctaaaaatgggactttcggtgctaagcacattttaagtcctaaagcaggtgttgccgttcatattaatgcttttaactttccaatttggggaatgcttgaaaagattgcaccgacgctacttgcaggcgtgccatgtattgtgaaaccagcaaccgatggtgcccaattaactcaagcagttgtaaaagccattgaagaaacacatgtcttaccaaaaggcgcactacaactcatttgcggtcagacttatgacctgttagaacagttaggtccacaagactgcgtgacttttacaggttctgcctacacaggccaaaaactacgtaaccaccctcacctcaataaatattcgattccatttagtatggaagccgactcggtaaacagtgcaattttaagccctgaggcaaatgaagaaactgtcgatttatttgtgcgtgaagtcttccgcgaaatgaccaccaaagcaggccaaaaatgtactgccattcgtcgtgcatttgttcctgaaaacttgttagcaactgtgcaagaaaagctaactgccaaacttgctaaagttgtggtgggtgaccctcaaaaagaagaaaccaccatgggggctttagcgagcattaaacaaaaacatgacgttgcagaaaaagttgctgaactcagcaaagatgcaaaaattgtttttggtggcaacgatagctttacatttaatgcagatcatcctgaaaaaggcgcttttttcgctccaactttattggtgtgcgaacagcctttacaagcgacgaatgttcataccacggaagctttcggtccggtatgtacactcatgccatatcaaaacattgaagaactagctgaccttgtttcacgtggtgaaggtagcctagtggcttctgtcgttaaaaataacgatgagaatattgagcagattattcaaaaaattgcgccttggcatggccgtgtgcatgtactcgatgcagagtcagcaaaagaaagtacaggtcatggttcaccacttccacatttagtacacggcggccctggccgtgcaggtggcggtgaagagttaggtggtattcgcgcggttaaacattatatgcagcgcactgcaattcaaggctctccaaacagtctgacacaaattactcactcatggactgctggctcaaaagttaatgaagaccgcgtacatccatttaaaaagtcttttgatgagttagtgattggtgagcgtttattaacggcgcgccgtacagtcaccgaagcagatattgtcaattttgcttgtttaagcggtgactacttctatgcacatactgacaaaattgcagctgccgagtctttctttggtgaacgtgtggcacacggttacttcattgtgtctgccgcagcaggtctatttgtagatgcagcacaaggccctgtgattgccaattatggtatggacaacttacgttttgttgaaccagttaaaattggtgactcgattcaggttgaactgacctgtaaacagaaaacccctaaaccacaaaaagacgcttctcagcctgcgcatggcgttgtggtatgggatattaaagtcaaaaaccaacgtggtgaacttgtcgcaacttatgacattttaactttagttgctcgcgaggcttaatgtttaaaatgagatggggtcacctcgtccccatctcatttttttaacactcaatggcgttaacagcgagaccaccttttgaagtctctttatatttctcagacatatctctgcctgtttctttcatggtttgaatcactttatctagcgtgacaaagtgttcatcgtcatcatgaagtgccatttgggctgcattaatggcttttacagctgcaattgcatttcgttcaatgcaaggcacctgaaccaaaccaccaatcgggtcacacgttaaacccaagttatgttcaagcccaatttcagccgcatgttccacctgttcaggagacgctcctaaaatctcggctaaacccgccgaagccatcgcacacgctgagccgacttcgccctgacaccctacttctgcaccagaaatagaagcattgagtttacataaaatgccaacggctgccgcacttagaaaaaagcgaactactttgtcttcggaaaagtctttagagaaagtcacgtagtaatataaaactgccggaataattcctgctgcaccatttgtaggtgccgtcactactcgaccgccagcagcatttttctcatttaccgctaaggcaaataaattgacccattccattgcatgaaaagtcgtcacaatcaggtttgagtttttcttatttaataacttatcgtgaatttttttagcccgacgttttacgtttaatccgcccggtaatatgccttcattaattaatccgttgtgaatacattgctgcatcactttccagatttccataatcttgctacgaatctcagcttcactccgccagcttttttcattttcaagcattaactcgctcactgataaatgatgagttctacataagcttaaaagctcagccgcactgtgaaatggatatggaactttaacgtcgttggtttcagtttgggtgtgtgttaattgtctttcactgacaataaagccaccaccaaccgaatagtaagtttctgcatataaaatttcttgagccctgttatacgcaatcagttccattgcgttggggtgataaggcaaagattcatctaaaaaaagcacatcatgcttatagtcaaaagaaatactcttttgctgattaagctggatggctttattttcaagaacatcttcaatcaagcttgtacttacttgagtatcaatatgttcagggtcaaaacccattaaacctaacagaacagacttatctgtcgcatgaccgacaccggttgccgacagcgaaccgtataacttcacctgaactctaaccgtggcttgtaaatcgtcttgcttcaataaatcatccacaaaactgtatgccgctcgcatgggtccaactgtatgggagctagatgggccgatgccaattttaaaaagatcaaatacactaataaacacgtggtcctaccttcgattcattattattcgtatgttcgtcgttattgtgtcctttcggatagctctaaaattatcattaagccatctataaagcactgaaaataaatggttcattgcctaaaaacaacacaatcaattgctaatacagcctttttaaaaaattgaattttccattaatttaaatggtaaatgactcaaccaatattgaagaattgttcttttgagcaaataaaatcacaaacctttgccaattttttataaaaaatatttggttttcaagttatttacttgaaatttaaaatatttaaaatcaattaaaaacaaacatttacatagtatttaaatcattcactgtccataaatagaataaaaattcccctatttaccaataaccatatatcgtatacgatatatgaaagaacaatagttctgtcgttaaggaaaacgtaatgacaagtcagtttaaaaaacagttatctctaatggatcttacattcattggcttaggcgccattttcggttcaggatggttattttcagcaagtcatgtggcctctcaagccggccctgcgggtatattgtcatggattattgggggctttgccgttttaattctgggaattatttattgtgagttaggcgcagccttaccccgagcaggcggtattatccgttatcccgtattttcacatggcccattacaaggatatttattgggttctgtgaccgtcattgccttttcaagtttaattgcaattgaagtcgtcgctgcccgcgaatatgcagcagcatggttcccttctcttaccgccgtacatgatggtgttcgaactccaactaccattggatggttgtttcagtttgcacttttatgcgtattttttgcattgaactattacagcgtaaaaacctttgcaattgccaacaacctgattagtgcattgaaatttgctgttccggttttagtgatggttgctcttctataccattttaaacctgcaaacttttcaatgaccgagtttgctccaatgggcgctcacggcgtacaaggtgccgtatctgctggcggtattatttttgcgtatttgggtttaacgccgattatttcggtagccagtgaagtaaaacgtcctcaatttacgattccttttgcactcatcttatctgtcgttttggcaacgattatttatgtagtgcttcaagttgctttcttaggtgcagtacctaccgatatgttagcaaatggttggtcaggacttagtgacaagttcccattaccttaccgcgacattgccatgttattaggtttgggatggttagcacttttagttgtttcagatgccattatttctccgtctggttgcggcaacatctatatggctgcaactccacgtgtcatttatgcatggtcaaacagtaatacattcttccgtatttttacgcgtgtagatccaaaatctggcattccacgttatgcgttatggttaacgtttgcactttctgtattttggaccatgccgtttccatcttgggataaattaatttccgtagtttcagcagcattagttttaagttatgccctagctcctgtcacagtgggtgctttacgccgtaatgctcctgagcttgaacgtccattctatgtaaaaggatttactgttctcgggcctctcgcttttgtgattgcatcttttattgtgtattggtctggctggaatgtcatttcatggttattaggcgcacaaatcgtcttgtttgcactctacgtcatttttaagcgctacgtgccaacccaagaagtcagccttgcccaacagttaaagtcatcaacatggctccttgtttactacattttaatgattcttgcctcttaccttggcagcttcggtgatggcgcatcacacctattggcagcgcctttcgacaccttattcgtcatggtgatttctcttggttgctactactggggtatacgctcaggtttaccaaaagcactgattaaaaatgacgatgaagcttagcgatcgtttgcttaaacacatataagttaaggttttcttttgattaataccgtatacaaaatacaatattttcaaatgtaaaaccttcgctttgataactctccaacgtcagaagaagcacttttgacgttcactctcaagtgaggttgataatgttaaatattactggtcaaaattttattgcaggtcaacgttcaagtgcaggcagtaagtttgtattaagctacgatgctgcaacagatgaagcattaccctatcagtttgctcaagcaactcctgaagaaattgatcaggcagctcaagcagctgcattggcttatccggcttttagacaaactacgccagaacaacgcgccgtttttctagaaacgattgccagtgaaattgatgcgcttgatgaccagtttattgcaacagtctgtcaagaaactgctttgccggaagcgcgtattcgcggtgaacgtgggcggaccacaggtcaattacgcctatttgctcaagtattacgccgtggtgactatttaggcgcccgtattgatttggctttacctgagcgccagccacttccacgtccagatttacgtcaatataaaatcggtgttggaccagttgccgtatttggtgcaagtaacttccctcttgccttttctactgcgggtggcgataccgcttcagcacttgctgctggatgtccagttattgtgaaggctcatagcggtcacatggcaacggccgaatctattgcaaatgccatttgtagtgcgattgagaaatgcgccatgccaaaaggtatctttagcatgatttatggtcaaggtgtcggtgagccactggtaaaacatcctgcaattaaagccgttggatttacaggttcacttaaaggtggtcgagctctatgcgatttagctgccgcacgtcctgaacccattcctgtttttgccgaaatgtcgagcattaacccaatgattttattaaccgcagctctaaaagtgcgtggtgataaaattgcgactgaacttagtggttcggtggttttaggctgcggtcagttctgtactaatcccggtttaattattggaattaaatcaccggaatttagccaattccttgaccagttcaaggctgcaatggctcagcaaccgccacaaaccatgcttaacaaaggtactttaagaagctatgagcatggtcttaaagaattactcgcccatgacaaaattgagcatttagcgggtcaaccccaacaaggccagcaagcctatcctcagctctttaaagcagatgtatctcttttactcgaacgtgatgaattacttcaagaagaagtattcggtccaacgacaattgtgattgaagttgaatcggcagagcagctcgctctcgcattaagcggtctacgtggtcaacttacagcatcattaattgccgagccacaagattttgagaacttcgcgacccttattccattactcgaagaaaaagcaggacgtttacttctaaatggttacccaacaggtgtggaagtctgcgatgccatggtacacggcgggccatatcctgcaacttcagatgcacgcggtacatcggtaggaaccttggcaatcgagcgctatttacgtccagtatgttatcaaaactatccagatcacttattgccactcgcccttcaaaatgccaatccgcttggtattgcgcgcttggtcaatggtgaaatgagtaaagctgctctttaatttttttaaaggagtttatccaagagatgaactcctttttttagttcaaagcctccagcgtaaccgcacattatttaaataaaaaagtgcaaaaaatgaatagcaagatgctccatcaaatcaatgcgtaacatattttcaaataaggatattggtatatgacgacaacattaaaaaaggttgtagcggcctccatggttggctccgtagcagaatggtatgaatttttcctttatggaaccgcttctgccctcgtctttggcgaacttttctttcaacaaaccggcaatgctatagatggaattttggcggcctttgccctgtatgccgttggctttttagcaagacctctcggtggcctcgtatttggtcactacggcgataaaattggtcgcaagaaattattgcaaattagcctgattattgtcggtatcactacctttttaatgggctgtattccgacctttcatcaaattggctattgggcacctacactcctagtgatactgcgtttaattcaaggttttgcttttggtggtgaatggggcggcgcagttattttagtttcagagcacagtccagatgatcgcagaggttattgggcaagctggccacaaactggcgtaccgctcggaaatttagtagccacactggttttattattactttcaaaaaacctctcacccgaacaattcctagattggggatggcgctgtgcattctggttctcagcagtcgtggtactgattggtttatggatccgaaaaaatgtagacgatgccgaagtgtttaaagaagcacaggccaaacaacagcttcttgaaaagcaacaactcgggattattgaggttttaaaatatcataagaaatctgttattgcgggtatcggtgccagatttgcagaaaacattttgtactatatggtggttactttttcgatcagttatttaaagttagtcgtccataaagatacttcacagatcttactgctcatgtttggcgctcatctgatccatttctttattattccttttatggggcatttaagcgatatatttggccgcaaacctatttatcttattggagctgtacttactgctttttggggttttgtcggctttcctttaatggatacaggcaatgactggctcattatgttagcaattgtgcttggtttatttattgagtccatgacctactcgccttactctgcgttaatgactgagttatttccaactcacatccgctatacggcgctttcattttgttatcaagtcgcacccattatggcaggttcgcttgctccattaattgccctaacattactcaaagaatttaatagttcgattccgatttctttatatttggttgccgcaagtctaatctctattgtctcgattttgctagttaaagaaaccaaaggccgatctctagcttttaaagattaatctttgatatacaaattcagcacttaataatgatttgggttgttctatacaacccatttttttatctaaatatttttgatagaggcccgatacaaagtaggtgacatgcctgtatgcaatttaaactgacgacaaaaagcactatggtcggtataaccacagcgcaaaccaatttgagtaatcggtaagtcagtcgcaagcagttcagtagcgacttggagacgaattttgctaatcatttgccgaggcgttaaatggtatatttttttgcaataacgttctaactgagccaccgacacgccagcaattgcggtcaaatgcgccaaagtaatggtttcggcgtaattctttttaatatattcctcaacttgaaccattttgtaaaaagcaggatgtgtattttcaggcacatttaaatcattagaaatacccgctattcctactaggtttccatccgcatcaaataaaggttctttataagttaaacaccaacccgactgattttttgcatataaatgtagttctaattgctctgttaactttttaccgcggcgaatgacttgcaagtcttgcgatgtatatattttcccaagtgaatgaggaaaaacttcagaagaggtttttcccaatattgcagttttatcctttagaccgcagcgatttactaatgtttgattgacaaagacatagcgtgcttcggtatttttgatgaaaaaaaccaccgaagataaagcatcaaacaatggttctatactttccagattttttaagaaatcttccaaagtggtagttagtttcggaatttgaaccaaagtcatgagctagagcggacaaagttataacttgtctactctagaacatttcatttttgatttaaaggagaagtagacatcgccatgaggctttttacacgagtaggcagtaatggtggtcgagagttaggcaactgccaatcaaataaacaagctgctgctgttgcacacgtgcttccttggcacgctcccattccacagcgtgtatgtaattttgcatcaatccaactattacgctcggcaactttatcaaaagttacatcttcacatcgacaaaaaatagtttctggccgtgcaagcgtttttaactcagcacgtaacttaaagcttttctcaaggagatgtgcaaataaacgataccgttgtctttgagcaaataattgtctcgctttttcattttggcctatagctgcataacctgcgatgctaccttcaaccatcgccagctcacttccgccaaaacctgtacactcacctgctgcccacacctgtggctgtgatgtacgttgatagtcatcgaccgtaatcgcattgtccttaatttgacaacccattaactgccctaattgagtattcgggactaaaccaaacccgcacgcgagtcgatcacactcaatttcaatgattcctttcggcgtttgtagccttactcgttcaagacgctcctgaccaatcgcctcaaccacataactgttaggttgatataaacgataaggcaaagataacgcctgtattattttcgaaggccaacgccaaagttgtagtgcaaacttacgaacggaagatgaagccgcctgttcggcaacatagagaacttgagcctctgctttttttgccgtatccgcacttgctaaaagtaatggccctgaacctgcaatcacaatgcgttcatttttgacaggtgtgcctgctttaattaaggcttgcaaaccacctacccctgttacgccaggtaaagtccaaccgggaaaaggcaaaaacagttctcttgctcccgtacacaatataagctggcgataagacaagtttaggctgtcgtgaggtcgctcaacaagcaattggcctgcaaaaggtgcggcgacaattttcgcaccaaacataaattcaatattagaatgagccttaatttgttgatatttctgctgcgccatttcaggtacagggaaaatcggtccagcgcgccagatttgaccgcccgcctgtgggttattatccaatattaaaattcgcccgccactttcggcggctgcaatagcagctgacaaccctgcaggcccagcaccgacaaccaccacatcgtattgtttttccattattgtgtttccactttcatgtcttgctggcacagcgtctgacaagcaagcactctgagtccattaatattgacacggcattcctgacaaactcccattccacaaaatggagtacgtttttcaccacaaactgacaaacggctgtaagacttcgcttgtgctaaagcagcagcaacactcgtaccttcaatcacagaaaccggttggccgttaataaaaagctgaatcatctatgcagctcctataaaacgatgaggtaaaaaaggttctggatctatatcaaaagttaatccacatatgtgtgagacaatcagttttgctgtacctgttgctgtggttacacctaatccttcatgacctaccgctaaataaaccgattcaagtgcaggatgtcgtccaattactggaataccatctggagtagcagcgcgaaagccagtccatgcccgaataacattaagatcagccaaagctggaaaataatcgacagcctctttaagcacccgagtaaagacttctggctctacagttggatcaaccgtattgaactgacgagatgacccaataaaaagctggcccgtcggtctaggctgaatattacaagccaccgaaattccacttgtcgcttgagtactggccgcataagccaaagccaccaatgtatgctttacatttaattcagggtaacggtcagtaatcgccagatgaccttttttaggttcaatcggtaacactgggaaaaaatctgtcgcatgaatgccgttagccaaaacgatatgcgcagcttctagccatgttccatcacttaactgaacccgattttcttcaatatggataactttagcttgttgaacctgaaccttgtggggaaatttttttaataaccattcagcagcacaaggtgcatataaaattccatcatcaaaaacttctaaaccaccataaagaccctgctttaagtgaggttcaagctgatgaacttcatctgagtttcgaagttggcaacggacaccttgtgcagtgagacgttgatatttttcctcagcaatctgcatttcttctgggctacttgccagccataaagttggcgtttggcgataggcacagtcttccgaaagttcgtgtcctaattcatgccatagctgaactgaccaatgactaagttttaattcggcgtccaagtcatccataatgaccaaatgccccatgcccgcggctgttgcaccaccgatccgagcatccaaaacttgcacatttaacccttgccgagccaattcataagcacatgcagcacctacaatgcctgccccaatgacgatggcatcggttctcatagctgaataccccaagcaaatgggtcattttcatccataaataaagttgcttcggcactcatgtaagcttcaccacgaatggttggaatcacatattcccctgcttgttcatacgaggcaataaactggctaccgataatgctggcttgtttccataactttcctggctcaagtttgccatctgcggccaagcaagcaattttcgcactggttccagttccacacggtgaacggtcataggccttgcctggacaaagcacgaaatttttactgtctgcttcggtgtcacttgcaaataactcaatatggtcaatttcttgcccatctttaccggttattccttgtgccgtaagcgcttgtctaaccgtccacgcatattcagtaagttgatccaaattatcacttgcaacacgttgaccatgatcattaatcaagaagaaccagttaccgccccatgcaatatcaccagtaacttttccatatttttcaacattaacttcgactgcttttttataacgatatgccggtacatttcgcacactcactgaatgatcttcatgcagtgtcgcttcaacatcacctactggagtttcaattaaatgcgtgcctacttgtatttttcccaagtgtgctaacgaagccactaaaccaatcgtgccatgaccacacatgccaaggtagcctgtgttattaaagaaaataacgcccgcactcgctttgggattcactggcttacacaataacgctccaaccagaacatcattaccgcgcggctctaacatggttgctctacggaaatggtcatattgttctgataatatttttcggcggctttccatatctcctgtgcctaaatcaggaaaaccttcaagtactaatcgtgttggttcaccaccagtatgagagtccaaaatttttactgttttcatagaagtatccttacattttcctttaggatgactgatctcaaaacagcaagcttgatcgttttcttataaatctatgacgaaatcagcatagtgaaaacttacttcagctaaaataaagacaaaaaaattaggccattggcctaattgaaatgataaagaatgcagcgcttattttttcacatttttatggtgaggtaagtgctcataaagtgattggcaaacaccattaatatgctcttcaattaacttaaccgccaaatcaacatccttggctttacaggctttcacaatttctttgtgctcatcatttgcacgtgatttgccttcggaaacattcatctgcaatcttaaatagcgctcaattttatcgtaaatcgaacgaattaatccgagcatataaggtcgctgtgccggttcataaaggcacgcatgtaactgccaatttagtgtggtccaacttccaatatccatgttatcaataaaggcattacaaatttcatctgcctttttataagtttcttctgtcatattcggcacggcgagctgaatcagcttcgtttctaacataacccgtacttcaaaaatctgagctaattcttcttcagagattcgggtcacaattgcaccgcgattttttataaactctactaagccttcggcttcaagttgctttaaggcttcacgtaccggaattttgctgacattaaatagcttggcaatttcatcctgacggataggctcaccttcagcaatatgccctgcaataattgcttctctaatatatttgacaataacttcagataccgaaggcattgcaccaagatttgatacattaaaagatggtagcgtcacgaatattctcttaacctcaaaatatgacacaaacaaaaggatgataattttagtcatccaccataatgaaattattgctttgaaagcatcattttcggtacggcttatccttcatataaagcttttaaaaactatttttatatcactataaaccaataatttttaaaatcattcatatacaaagtatactttataccatttaattcacaaaactattattagactatgccgaaatcgtcattattttattgtatttaaccaagcaaatcgtcataaataccagcatactaccctgttctcttgacgggaaactgtcaaaaattcttatccattgagctgattattccttacaaggtaaaaattattatcttgtagaaatcttgctgcataaaactttcagagtttgagtcacttcatatgagtacgccaacagaagcaaaattttccctgacttattatacgggtttcttatctgtactatttgctgcttttctatggggtacggcaggcacagcagcatcttttgcaaagggcatcagtccacttgtaattgctactatttctgtgggcttcggtggtttaattcacacatttttaagtttaaaagccattaaaaaagattaccgaaagctttttgactataagaccaaagttttgattgccgtcattgtttctattctttgtccgtttgctttttattcctcggtttcattagctggtgtttctattggtactgttatttcaattggctgcgcccctttgttctcagttatgcttgagtggctattagataaacgtaagctttctttaaaatggcttatcagttttattcttggttttttaggagtcgttttactctcatatgcaggcgaacacagtcaccaacatcaaggcgtccaatccgaacggctattaggtgtattttttggcttactctcaagtctgagttatgcaacatattcgtggattatgaaaaacttaatccataaaggcatcaactcaagagctgccatgggcgtgatctttgggatttcagcagttctgttattacctactttattaattacagcaactcacctatttaattatccaaataatatttgggtagccctttatatcccaatcgtacctatgttcttaggctatttattttttagctttggtttaaaacgtattccagccagtcaagccatgacgttagctttggtcgaaattcctgttgcagcgttattggcagttgttgtagtaggcgaaagtttaacaatgaatagttatttaggtttagttttaatattcctctgcgttattgtcctcactaaaaaataaataatagaagtaaaaaagaggctaaatcgttagcctcttttttttatagatatttgcttagatttcagctgaccagttacggtaccaagtacggaataattcatactgagtttcaacgtatttacgttgtgattcactcaatgcatccgtctcgttaaaatgtaaggtatattctttatcgccattaagtaccattaagtacttgtaataaaggactaaatcagtaccttcatcaaaagacgataaaacttctaaagcgcttgataattcttgtgccaaacgacgagctttcgcatcgcctgctgcagctttcttactaaggtcaaccaactgtaaaacttctttaggcaaagcattaccaatgcccgtaattgctcccgttgcattgcagttaacgaaaccatggaaaacctgagtatctacaccagccattaatgttacagagtcatcttgagaagtgatgaactcagctgcataacgcatatcagcagcaccaccaaattctttaaaaccaattaagtttggaaattcacggcgtaattcaaaaaacaaatctgcacgagtcgcaaatccataatacgggctattgtaaattaccgcaggtaagctaggcgcagcttttaaaatcgcagaaaagtgtgccttttgtgcagttggtgatgcaccacgtgataatacacgtggaattaccataagcccttgtgcacctactttttctgcatgagctgcatgagaaactgcttcttttgaattaactgccccagtacccacaattgtcggaataccagcagctacaagtcgtgctacaccttcttgacgttgagcttcggtcaataaaggccaatcgcccattgaaccacaatacactaccgcactcattcccgcttcaataagctcatgcccttttttcacaagcgcatcaaaatctggctcacggttaggagtacatggagtcattagcgccgggatacatcctgtgaagatattactcataattattcctcagtaatatagttaaaactattggtagttgtacttttgagttaatccatctcaaaagttatggaatgggtatcaatagctgtccaatcattcttcatatatcgtatacgatatacataaaaaagaatagtctttgttctaaaattcttttcatctaaaaaaacgtataaaaaacaaagataaaaactgtagaactgataaataggatatgttttgaaagcttttttctgatttattaataataaagattcaaaaattaaacgggtctgaagaaaattatttactttcaaaaatggttaaaaaagatacaggaaacattagccattagtcgcacatccctatttttactcatttttactggtaaagtgctctacatggtttgatacaacctacttaactcagatgcataattcacctgttacctgcatctgaagtttttctgcctctagtccgctaggggctttttttatgattacttaaaatatgttctattcaatgggtggaaataatacaaagaaaaaagcctactcaagaagcaggctttttaatcatttattttgaatcattggcttttttaactttagcatcgtaatgacgatagcaataaccaaaaactgctccagcactaaagaaaaacattgcttgcatcatagctcggtcctacacatgatttaaaaggaacttaaaacttaacacctatgtttgtttttctttgaatgaggtttaacaggtttttgtgcattatgaaaatttatgtgattaagcttaacaatttatttggctgcctaaaaaaagcctgtcttttgacaggccttcttgttcgaacttaagttaattctttaattaaagaattaaccacatgttgcttgagtaatttttttagaagttggatcaattgtgacagttactcgatttgaacgataatccattgtcatcggttgacctggagcaactttacgaacaatttctgacttcgttttttgcttaatttgatcatcggttaaaccagatagcccaactaatttttgagcttcttctgaaacacagttcgcctgattatcacggaataatttccattcttcgacgacttgtccatttggcaaatggcaataacctacctgaccatttgcttcatttctaatttctaatttcccgccttgttcaacgcaatattgactagcaggatttggtgaaccaatttttggaggagttgaatctttatgttgtactgatgaacaagccgttaacgaaacaagcgctaaaccaagaaagataatttttttcataaattttgcttcttactaaaagaaataaagatatcaaaaaaatttatgttttatatgacttgtttacaataaaaaaccttcatagagagcaacttacaaaataattctctattgcaaatgttaaattatgatgcgttatatctaacaataaaatttatcttctatggtctttctaaaatacgcggcccggcaccttcttgtcccaacacatcatttggattccttaatggacattgttctaatgacaaacaaccacatccaatacaccaatccatttcatctctgagtcttgtgagtttttgaatacgctcatccaaattcttccgccaatcgagagatagctctttccattgttgtgcagttaatttagaacccatcggatacttacttagggcttgttttatttcatctaatggaataccaactttttgagcaattttaatgatcgcaatgtagcgtaacaccactagagtaaaacggcgttggttaccattggttcttatacttttaattaaacctttagattcgtaaaaatgaagggttgaaactgcaacaccgctacgttttgcaacctcaccaaccgttaataaacgactttgattcctttcactcatttttattaatctcaagcttagttgaggtcttataaaaggatgctctgtactgtacacgacaaatttcacagaacccttatcctatcagggttctgccttcttaaaattgccaaaatttccttaaactcttcttttttcccaaaaccaattaaacgctgaatcgccatttgaacatagtctaaaccatagcgaaataaactcattgagagtcgtccatgcttctttatttttatcgcttttttttgatcatgttgccattcacccgttaagtaacaccaacagaagcttatagctaacaccgcaatcaattttttcactcgtctagggtctgtcaagcgcgtattttcaagattaaacccgcgtcctttgagacaactgaataaggtttcaatttcccagcgtaatgcataatcctgaatagcattggcattaaactgaggagaaacgacgagtaaaagctctccattttctaactgtagtgcacttatatatagtttcacccgaccaaccaaaatccgtcgtttacgacattcaatttgaccaactttaagatggcgaaataaatcactaattttatgattctttcctaaatgattggtgacaatgaagtttttttaacacgaatgcagaagttgatgtcttgttcaattaaccatgtaaaccactgctcaccgataaactctctgtctgcgaacacattcacaatacggtctttaccaaaaatggctataaagcgttgaatcaaagcaatacgctctttcgtatctgaatttccacgtttattaagcaatgtccaaaggataggtatcgctattccacgataaacgattgcgagcatcaggatattaatatttcgttttccccatttccaattggttctatctaaagtcagttgcacttggtcgaatgaaaacatattgaaaatcaactgagaaatttgacgataatcaaaatactgacctgcaaagaagcgctgcatacgtcgataaaatgattgtggtaagcacttgatgggcaaggctttagatgcagaagaaagattacatgtttgctttaaaataatcacaagcatgatgagcgcaaagcactttaaatgtgacttgttccattttagatatttgtttaagataagatataactcattgagatgtgtcatagtattcgtcgttagaaaacaattattatgacattatttcaatgagttatctattttatccgggagaaaaggatgctaaaattttgtcaaattgccatctaactttaacctttcagcaatttaagctatttataaaaattaaaaactataatttgcaaaattgaataaaaaaacatcaaaattatttaaattcactattcatttttagattcaataaaaatattatggcctgctttcacaaccacatatccagaacatattataaacaaatggcataggtgcacctaaaggatagactttagcctcctctattttatatgtcttttttcttgattcgatatgtaaaatactatcgcaacgtgcaattacagttccttttttatatagtttttttctttcattttttgcatcgaatttatataccaaaaagtaaactttttcccctacctctatccttgaatgattaaccataatgtaaccattacaatacttacattgccaatcgtccatatcttaaaatatcacatactcaaatgagaaaaatagaataactgttttagtataaatttattaaaaatataaatctaaaaaaatatttaaatttaaaaaataatacttatttgagacgttcatcacacaattttcctagctaaaacttagtagataaatatataaaagacaaatagttacacaaatataaaattattactattttccattgagtgcacttttttaacaatagaaagttaaaattatttttaataatattacacaaatataatatattatttgttatatgtaataaaattaaaaaatactttattattcagcacaaataataaagattagatattttcatcattaattgaaaaaaattcatttttataagcagttaaaaaatctaaaatatataaaaatataacttattttttaattatggctattcaacgtcaaaaactcgaactcccatctggacataataaattattactccattcttgctgtgctccctgctctggagaagtaatggagtcattaattgagtctaatataaacttttctatattcttttataatcctaatattcatccggtaaaagaatatctcattcgtaaagaagaaaatatccgcttcgcagaaaaacataatattccctttattgatgcagattatgacaccgataattggtttgcccgtgctaaaggtatggaaaatgaacctgaacgcggtattcgctgtaccatgtgttttgatatgcgcttcgagcgtaccgctttgtatgcatatgaacatgggtttagtctaatcagcagctctttagggatttcaagatggaaaaatatggcgcaaatcaatgactgcgggattcgcgctgcttcacactatcccgatattcagtactgggactacaactggcgaaaaaatggtggctctagccgcatgattgagattagtaaacgtgaagaattctaccagcaagaatattgtggctgtgtgtattccctacgtgatacgaatcgctggcgtatgagtaatggtcgagatcgcattaaaataggtgttaagttttatagtaatgcaatggaaaatgattaaaaaaacttatagcgattcaaaaataaatatttaattatatttatttacttctagattttctaaccgcaaataaaaagagccacatctggagaatgtggctaaaaggtgtacttagacgagctttgttttattagaataataaagctagcttaaaataagattaataaaaaaaaatttattttagaaagttataaaaataagcaatttcttttctcatcaaatttattgtgttagtttttaatactttaatgtttctataaaacattcatatccaatatataatttcatcaattagtcagaatgaagtgtaattatgattcaaaatgaaacgatcgaagtctcgccagttcaacaacaagactatactcaatggttagaatattgggttgcctatcaaaatttctatcaggtcaatttacccctccatatcacaaaaatgacttgggatcgttttttcgatgaaaaagaacctatttattgtgctgttgccaaaaataaagaacgtatcttaggttttgtcacttatatgtttcatcggtctacttgggcagaaaataactactgttatttagaagatctgtatgtatcacctgaagttcgtggacgacacattggtaaacaacttattgagtatgtacagaagcaagccaccgaacatagctgtgaacgtttatattggcatactcaagaaagcaatcaaacagcccaaaagctctatgattggattgcacaaaagcccggcgttattcaataccgtatgtctttgaactaagcgaagttaaacaccaaaaatttttactcttttggtgttttagctttaatcatttttgactacccaaatagattggtacttaaagcttgctgcgaatgagtttgactaccttatcattcacagttgagcattgattaaatgctgcaaaacgcttgagttcctgatctaattcaaaaaagaaatgctctttatcttttaccgttttttctaaatgtagactaatcacttctagttcttttactgtccggtgtgctttacagtcgattcgtcctactaactcattttgataaagaataggcaaacaaaaatatccaaatacccgtttggccgctggcacatagcattcgatccgataatcaaattcaaataaggaagttaaacggtcacgatgaataagagagttatcaaaaggcgaaagtatttttagaccaaaatcagtatccaattgttgctctattgcagttacatcaacatataaattttgtccgtcggcaagtttaatcgctgatacgacacctgcatcaatctgctcttttagcacgacacgcatggtttcttttaaatcatttttctttaaatgaaccaattgtttccacgtaaatgcaccatgagctcgaagcgtattattaaataaatactgagcatattcgtaaagcgtaggcaaacttaaatcaatattttcaggtaggcagcgttcagtcaaatcgtaaactttttccataccgttacgttcacagatcatcaggtcaccttgcatatataactgctcaaaagcacggcggcctggaccggtattccaccaattccctaaactctctttatttttcttatcaatatcccttaaccgaattttaccttcggcacgtacacgtaccagaatttcattcataaggtgttgatcgcctctattaaaatagcgactttccccttttctgacagacatcattgccggtaatgcatatcgataatctttcataggaagataagaggccgcatgataccaatattcgaaaatctgccgttcacgaaccaaactgtttaaatggcttaaatcataatccggcactcgactccacaatatatggtgatgagcacgttcaacgacagatatggtatcaatctgtacataacctaaatgctcaatcgcctctaatgttccttgcctacctgctgcgaatggactattttttcctaagccctgttttaataaagctatttttttcaaagaagatgtcataaaaatcaaatattgttgtgttcatttaaaaactaaaagtttcaatattatcctatcacttttctttaaccatcttcccttcaaaatagtatttctttgggtccgtaatattctttaatcacctaaacttttattagtgaattttgttataacttcttggagctaaccttaccactaacacaataaccaatatcacactacataaatgaaaaatccaacctgccttataagtccctgtaaagtcatgcaaagctgctacaaaccaaggcggtattgcagcaagtaaaaaaccgcctccttgcataagtgcagataaagcacccgcattgttcggctcttcaaaatggtctaatgccacaataagtgttaaggcaaaacaacctcccaagcctattcctaaacaaattacccataacacagatgcaaattcaggtataaaagcaagtcctgcaaagccagcaaattgcatgaatagagtaaaccacaaccacggacgtcgatctttatatttcctagctaaaataggcaaagacagagccgaggctgcttgactcaaggcaagtaaggcaagcaatttaccactttgagaaatactccagccatgatcttgaaacgaaggtgccaaccacgcaaccaccgaagaatagccaccattgaccaaaccaaaacacagcattaacaaccatgttctaggtttctttaataatgtttttacaggtgacagatgggcagtcgaacttacaatggagggtaaaaaaataaatgttgatactagtgctaatacagcgggtatagtaaagaaagccagccccagtgaccatagacccgttatattggaaatcacaggtgccaaccatgcgcctagtgcgccaccacccataagcatagctgaataaagccccatcataggcccgatatgttgactaaactctcgtttaataattcctggaaaagcagcctgtatcagcgcgacgcctaaaccaataattattgcactagcaattaaaccctcagctgtaggaaataaaaatctaagtgcgcatccaatacaaatagtcagcaaagcacccaaaacaactctgcgttctccaaccatgctctgtacgattggaccaataaaggcaataagtcccatcaacatcatgggcaataaagtgagtaaagctattccttgtagacttaatccagtacctgctcgaatctttgagactaaaggaccaatactggtcataaaaggtcttaaattgagtccaaccagagcgactgtcaaaataagcatgggacgagccaagaaagctccagactgcttcattactttaggcccgattgcttagcttgataatttttccaaaacacataaaggtcggtacggtcttcaaatcgaacgggcacacattcaattttcatagactgttcagcaaatggttttacaagatcggcatatatttcagctgtagataaaccaaatggtgcgccatcttcattagaataagcatagttaactgtttttatacccgctaaacgcattgcagccatacacataggacatggatgcccgcttgcaaataccgaacagccttctaaattcgcggttcctagaacttggctggctgcccgaatcgccaatagttcagcatgtgcagtcggatcattggttgtcaaaatttgattaacacctgaagcaattactttgccatcttttacaattactgcgccaaatggtcggccacctttttctatattgttataagcaagctcaatggcttgacgtaaaaattcctgatttgctttcacttattcctcctccatctactttgcaccagctacaagcaggagtttttcaatttcacgatatcctcttgtacgtgcatgttgtaatggtgtgatcccatctttatctgccaaattcggattggcaccagcttttagcaaaagtgccacaatttgctgatagttggatttgccattacctaaaatgattgcttctagtaaagctgtccaacctaaattattgacatgatttatgtttacacctgcagcaattaaagtacggacagtttctacatggccccgttctgctgctggaataagcgcggttcccccataacggttagtactctttaaatcggcaccatgcatgagtgtcattcgtaaaatttttaaataaccttgtgcgcctgcatacaaataaggactatcttgtatattatctttagcatttacatctgcgccggcctcaatcaacatatgagcagcatgtatattgtttgctcttgttgccaccattaatgctgttgaacctgtttcatcacgtgcatcaattaaggtcttttgagacaaaatatgttttattaactgaatatcgtcatttgcagctgccatgtgtaaagggtattcatcctttgcatttaccacatttgtaaaacccaaagcacccatcgcaatgatcagattgatccatatgagggacttacgcatgaaacactccaaataaaaatgaattgcataacaatttggcactagaataagcgcgcttaaaagtatttgaaaattaaattatttaatcgattgtattaagattataaatacttaagcatcttgttctctgcgttattgatggtattcatttatgtttgaccctcgtcttcttcgtgcatttgtgaccatttttgaaagtggtagttttacagccgccgctgataagttgcatctgacacaatcaactattagtcagcagttagcacgcctcgaagaatcggttggtcactcccttattgatcgcacagcaagaccattacaattaacagcttcaggtgaatatttaattggttatgctcaaaggattttgacgcttcaacaagaggccgaggcggtcttaaaagatccagctggcagcatccctattcgaattggattgccagaagatatgatgagtactgctatggcagaagtttttggtctatttgctcaagaacatcgtactattcggttagatgtcacttcaggcttaagccgtaacctgacagagcgctatcgtaatggtgaactggatattgttattgtgaaagaatcagcagccagcgccgattgttatgcctcttttcctgaagaaatggcatggtttgaaagtgaaaatgcgattacgcctttgtctgaaccaattcgtttagtgacctttcctcaaggtggactttaccgagatgaaatgtttgaaacattagaacgtgaacgacgacgttggtatattgcttttacaggaagtagtttagaaagtgttctagtgagcgtcgaaacaggtttgggaatatctttactaccagttagtaccacaaaaggccgtcgtgtacgtagatataaatctttaggtgaagcttcacctatggttgtttcaatttatacatgggaaaaagctgggttgatttcccagcttgtcgatcacatgactaccgttttacatgatcgcttccaatcaggctcctaggtttaactgatgtcatttaagctttcggcaatcagcttttccgccatttcttgagttttcttcaagcctggcattcgatattctgtatggccataatcttgtatagatttccagcgaccaccccatgtaagcccgacagactcagcaacttgcccatataggcggtaaccctgcatagcccatgggtcacgttcagaaataacaactttaccgtttcgcttaaaggccacatctgccgctaaaccaaattgatgataactttgatacccttttgctctggttgtattcggattgcctgccaacatattttgacgtgctggactacgataaccttcaagcaaaacaagttcataaccatattgttctttcataattttaaagaccataagcaaacgctgcttatagcgtgggttcattttatcccacttacggttgactaaactcgtatctaaaatcgcacggccatcaaaacttgtattatcaattggtgaagaatttataacaccactttcttgagaagcatattgctgctctaactgagttgcttcaacaattgcagcttcaatcaggctttcatctacttcaggtggaggcgataatatttctccatttaataatgcataaatttgcggatcagtttttttaagatactcggcttcaattcgtgttgaactgattgggcgagtaaaagcaaaaattaaaatactggcaaataaaaaaaatcctgcgattacaatccaccattgctgtaaatgccaatgtgattgtagtttttcaggagccgcagcctgattcattgtttgagcaaattgtctaacttgatttagctgccgacgcccctgaggtaataaagatagaacaaatgttctacccttatttcttaactcataagacatcaaaaatgctaaccctatagcaaggcaagcaaaacaaaagaaaattagaaaaatcatcatgacttaactaattcacagcaaacggacttcgtgtaattttaatatcaaccgaagctttaggtggttccacatcagcctcttgttcaaccggagctttatttacctcagcgggtttggcttgaaccactttcgtctgggtagccggtttttgctgaactacctgtagttttggctgtacaggtttagctacagcctgttgcttaggtacaacctgttcacctgttaactgtgcatcaaaaggtgaaacacgttgtgggttaggttcggcctctttatgaggagcaggcttaaaaatgttacttaactcattctctttaggttgctcaaaaccatcatggctcatcggatcagtttgctcttgctgatcacttactgcttggtcatgtgcagaagaattagtcatcaagacttggtcaagctcctgatcttgattcgatttgctctcaacacttgtagggtcggatgaatacggttgagacaagaacaggaacagtgagatacttacaaaaacacctgcaataataccaatgatgatatagattacgggtgatctcgacttttttttattcgattgcaaaactcgaatagaagttggtttttcctgagccatttctttccatcatcaaggtaagtaaattgtaatatgtgcctgctcttgtggggcagaaatcacattttgataattagataatgctttatcattttgattgttaagcataaatcttaaacctgcaaaggtaagtaatgcaaaaatcaataagaaaatcaaaatccagaaaaaaggtaactcacgatggataatatttcgtatctgatcaggaattgccgagaatggcgaaaaagccacttttttccctttcagataatcaatttcatcgcctactcgtgccaccaaatggttaaggctttcaattgactcaattcggtatttaccctgaaaacctaataataagcagtaatggaagacttcaagagcagctaatcgatcttttccacgactacgtagttgctctaaaatttcgaagaattgataacccgctaactgtgaaccaaacaggcttaactgtaatggactaattaaccaagaattttgtaaattaaaatagcttgggtcttgctgggttacgatcgtttcatcaattagcgcacaaaacgcatatttagcatcatgaatatcatcagctgaaaattgtaactttttcgcttgttgctcaaatcgattaagcaaatctagaattttttcacgaaagcgctgtggatcagctggcacatactgatttcgaattaaaaagattaagtaaaaaccatcatgcaataaatcaatcagattaattgcctgtaattttacttgggactggctattattgttcccccctgtcccaatttgcccatcgtcaaataaagaaggagcacctgtagattgtgacatttttctctcctttatctttaagcgttcatgaccgcaatcagctcaatactgatatcttggaatccagccggaacataaatacaaatcgtttctgaatccaacatacgttgatagagttcatgatgcagttcgatttcaaaatagctcacacccgaacgtactggaatagcagttggaacttggattaagtggtgtaatggaattgctggtaatgctgcaacaacacgttgttcaacatctaaagtactaccgattttaaaacgtagaggaacgatttgaatcaactcatgggtctgcatcacgctacttgatacagcaatataaagtctggtatctcgagtaatcttatcggtttcgagacttcccacccaatatgaagggcgaatttctttaagggcaatactgatgtaacgactcgaaataatcgtatcgagtaaatcacgtaaaattgtgtcgagctgggtgaaactctcttgcaaattatgatgtttatatgcaggtaactgatcaacttcataagctgtcgagaaggttaataatgaacctgctaaacgtagcaattcaaagaataatcgttccggatgaatttgcggatattgcaagaaatggctcagaccagcatgagcagtatttaaagcatttaccaaccaaaacgaaacgatatcacctgaacggaattcaattaatttctgctcattttctcggttattggtttgaatcgttttaatttttgccttaataacattcaaggttctttttaaatttgaaaccaaggtctcagatgcatcgacatgcaaaatgggcggaataaatttgcggtcaatttcaaaagcacctgaactctgacgtttaattttgcctattggcaaatacaggaaaccatctaaattatgatcaggattactatgtgcatctaataatttaaacacagctcgacgacgtaataagctgatatcagcctctgtcgcgtttgtgaacagatcatgggtctcaaccaaatgtgattgatagcgccccttttgtgattgattttgatcgattaaattttgtttattggcttgtaataatggtaatgccaaatagatgaccatttcaccacgtaaattaagctcatcaagcaaaataggttcaggtaataagtcataagcaggcgcttgatatatttcaccatcttgccaaatcatttctaccgattcaagtgcaagaatatgcgtacttaactgtgcttcatcaaaactaagtttttgaacgccataggaaaatggaacaacagcacgaaccgtatgatttaaacgttgttcatgataggtatcttgaatctggaaatgttgaggtcttaaaaataaaccttcaccccacaggactttttcagctttaaacatatctctttaccaatctttattcatattcatttttaggttgaacacctaacatttcctgaaccatttgcaatggatgctcatctttaatcacttgtgctaaccattcatgcagcggcatttggctccatttaatggtcttttggagcatatagctcacaggactatgtggctcatttgcttgaaaataatcagctatttcttgcagcactttcattgcttgctcgcgattggccaagtgagtttgtgcttgtggctgaaacataggctggtctgatacgatttgtacaggcacttgattttccatagacggtgtcgtgatgacagcggcctgttcttggctcggcgcaagcccagtaccaaaagcctctgctttgtaaattttacgtaaagtgctgtgtattgtttcaaatgcagaatcaattgcagcaaaactcggtgaatctaatcccattaaatggtcgagtgtctgttttaaaacattccactccgttaaaaccgaattaaactcttgataatttgagtattgaaaggttttagaggtattaaagatcgcttgatcaaattgttctaattcagatggacctgactgactctcgtactcttctgtttgcttacggcgtatattttcgtgatatagaaaattatcgtaatcaagcaagttataataaggagctgtattggttaaaggtactttcttcaacagcattggcaactgattaataagaccttgtaataaaccaatacgctgatccaaatcatcatcttcaataatcggatgaatatcctgccaatattggttcagcatggtatgagttaaagtgattccctttaccatgccttcaaaaccatttagatgagtccaggcttctattacccaagttaatagacggatatctttggttttttcaatgagcaaagtgcttacactcttcgcaacaaagtcccaatctgcctgcttccgttcagcaacccaatccccctgatctaataatagatcatcctgtgttctggctttctttatctcgtgaaattcattagaaaatgaataatcctcaccacaaagcaagctgtcattaatgggtttaagtagttcagaaatatcaatactcatctaattttggctctattaaatttttaaacttctgatttcaactttttactagtccgttttttagcaggcttcgccacaggatctagtaaatattggatctcgtcatcttttgcatcaatcatgatcaatttcggcaatttttgatctgctaacgccactaaaatttcagttgccaaagcaggtaaaactgtagaatttaagatgttatcaacattacgggcgccactatccacttcagtacaacggctgagtagcaactcgaccaagtcatctgaatattgaacttccgttccatattgtttttcaattcgagcagtaattttgcccaatttatgtttaataattcgaaccaataaatcatcatgcaatgggaaatatggcacaactctcatacgccctaagaaggctggcttaaactgtttatataaactcggttttaaatgttcgattaaatcttccgcggtaggccattcttctacaggctgatttaaacatgcctgcataattgcactcgagcccgtatttgaagttaataagattgtcgtgtttttaaaatcaataacgcgcccttcaccatcctctaaagtacctttatcaaatacttgatagaacaactcctgaacatcgctatgtgctttttcaatttcgtcgagtaacacaacactataaggattacgacgtacagcttcagttaaaaccccaccctgaccatagcccacatagcctggaggagcacctttaagcgaagagacagtatgtgcttcttgatactcagacatattaatcgtgattaaatgctgttcaccgccatataactcattagccaaggctaaagcagtttcggttttaccaaccccactaggtccaactaaaaggaacaccccttgaggtttatttggatcttctaatttagcttttgaagttttaatcccttgaactaattgtgtaagtgcataatcttgccccattacacgctcacctaatttatcttcaagcgttaaaatctgcttaatttcatcattgaccattttcccaacaggaataccagtccaatcagaaataatttcattgatgatctgagagtttactcgctcaaaaactaacggctgttgtccctgaatatcagcaaggtctttgcgtattaaattaatctgatcgtaggcttcagactcattagaatggctctgcgcttctaattcctgaattttacgaactagctctaattctttttgccattgttcctgagtctcttggatctcactttgtaatgactctagttggcttttcagattttctaatctttcatgatgtattggaatctgacggtgttcattttccaaaatctgttgctcaagctttaagttatgttcttgtgcttttaattgatcaagtttgactggctgtgcattttgggtcaaagctacacgcgctgccgcagtatcaagaacacttactgctttgtctgggagttgacgaccactaatatagcgatgagaggcatgtacagccgttacaattgcttcatcatcaatttgtaaattaaagtgcttttgcattacaggaatcattgcacgtaacatatctacagcaacttcttcggtcggttcttcaacctttaccacctgaaaacggcggctcaatgcagcatctttctcaaaatactgtttatattctgcccatgtcgttgcagcaatagtacgtaactcgccacgtgcaagtgcaggttttaaaagattggcagcatcgttttgccccgcttggccaccagctccaataagcgtatgtgcttcatcaataaataaaataataggatgagccgatgattggacttcttgaataacttgctttaaacggttttcaaattcacctttaacacttgccccagcttgcaaaagccccatatctaaaacatgcaaatgtacattttttaatgcctcaggaactaaaccttgagcaatttttaaagccaacccttcaactacagctgttttacctacacctggctcaccagttaaaattgggttgttctgacgtctacgcattaaaatatcgagcatcaaacgaatttcatattcacgcccaataacagggtcaatcccaccattcttcgctttttcagttaaattaattgtatattgatctaaagcaggtgttttttgagtttttgcagttggagtcacggcttgttctaattcatctgcttgtgaagatgtttttgattcttcttgttgttctacacttttttcacaaatttcgagaaacttatgtttcattgagtctatcgggaaaagatcgaataaactcgaagctctcgttgcaatttgatagaggtcaggtgcagttaataatgcaaccagtaaatgaccactacgaatgacaggattttgttctgctgaagccaataaccaagcttgttcaaataaacgaacaattgatttagcaaaaattggagtacgtgtattaccttttggtaattgagaaattgtttcttttaaatcatctgctaaagcatcggctgagattttatatttttttaataaaatttttaaatcgttttctaaaggctgattaagtaactctaaaaataaatgttcaatttcaatttcgtagttttgctgaagaacacaagcattagcagatttttctaaagcagtgcgtgcagctgtagaaagttttgtaattaaaatttttaaactactcatcattactctcaatatttttaaataatttaatacttaaaatcataatgcccgtatattaccaaaatttagctttatccgacaaataacccagcattacaatcattaatatgatttattcgatttcttatatctgaataaaaaatctaataccatttaagatcatttaattagtacacatatctttttaacttaaacatttaagaaaaaaagatataccctctgctacccttgattaaccaaactttgtttcggtaataatttacagccacacgataatgaatcatttactcttgctgctgcttttcccatcacttgcatatttgggtcaccggaaacaatcgtagaaaccgttttatgcgccggacaagttgctttatcacctacacatgcaattgcgattccctcaattaaaaatgcactattaccagaaatgacttgccctccacctgtcgttgggcatccaatcgtaatgtaagggctagccatattcttctccttatccctataaaacggtgaactcaattcggcggtttttcttcctaccttccgcagaagtattgtccgctacaggcttagatgaacctaaaccttcggtagataaatgatcagcaggaatattcttactaattaaataatttttaactgctaaagctcgatcttggctgagttttaagtttttggtcgcatcaccagaactatcggtatgccccacaattttgacttttttcccgcccactttatttaaagccacagccatttcatcaagaattttttgcccagcttcagttaatactgcactaccagattcaaattcaataattcgattttttaaagcatcatcaataatcttctgctcagcctgatttacagaaagctgggaaaataattgatatggaggctgtaccaaactctgaaaagactgaatggttggctgtatttctgtcggatttagcattttcccggtcagttcaaatcgggttccattaacacttaacttaccctgagaaacttttttaagatcaggtgtaatcactcgtgtgacagagtcactccatccatttggagcggcaactggtcgaacttgtattttatcgacaacctgatctgcaccataaacagactgcattttcattaaaatagcctgtttacttgcttcatttggcactacaccttctacaactataggctgtgctaaagcataattcgcaattgcatatataaaacagccttttataagttgtgaaagtttaatttgatatttttgattcattgttattcacccaaaaaagtctgtctaaatagttttaaaccttgatttaaacttaattggcgttgacataaagattgttctagcgttgctaaaccagcattctgttccaaataagtatcaatccattgagcttgtattaaagaaacccaatgtttgctatccatattctgagtaaaaatatcgctaagagctaaaatatcagcaccctgaaaaccaaagaataatactggctgctcccgatgtaacaacccaattaatacttcggtattatgctgttttaaaaaccgacaaataatactgacccagaatgccgctatttcataacaataagcaggattattaatcggtagaatcaagactttatttaaacggctagtcccattttgtaaaattggttgtagtagtaatcctaaaccaatcatgctttgagctaactcataaatacttagcttcattaactgagcaaatgaatgcatggtatgattttcataaaaacctacacattcacgttcagataaaacctgaatttgatttggtaaatgatttagcttaccaaataataaatcagaatctttaatccctcttaatgcacgattattttgaaataaatcaactaagacatgcttatagctataaggtgcatatagtaaattttcatatggtaaatcaatctcaagtaaatgactgagtaccatcggaaaagctcgacctgaactgtcttcgctcgccaacaaattagcagccaagaacatgttctcttgtggatttgcaataaagaaatccaatgaaggcaacttgctatatgcttctttgaacatatttgactgcattgcatattccaatgcttctgttatccactgatcaagtacctgtattaaggcatattgaccttttgtctttaagaagtcaccacgtgcagggcttttcccgtaatacagaggagttgtttttaatgtatgcatcaatgctcctccttgaatgtagaggttagtttccatgtcatggcttaactcccgcagcaggttgtgctagtgcagaaactggattttcagttttggcaggagcagctgcctgagctggtgcttgctgtgcggatacaacgcgagcagccttatccgcagttactttgtcaaccagttgcataccagagtagccacggcttgaaccgatacttcctgaattactactaataagacggaagttcattttcacaaagagtgatggatctgtcttactgcgccaaagcatttcaaaaccaccgttttgctctttacgctgtgcactatcgattaaacggttaatcccgtattcgcctggttcatcaaaaatggtatgtgtttgaccttgtaaatctacagccgtaatacgagcacccggaatactgccttgatttggccaaataaagttaacccattgctgcaccccattttcataagtcatacgctgaccatcaatatcaacggtatatgaaagtaactgcgggttttgaattgggtagaactggaagttagactgattagttgccggagcagctggtgcttggctatttaactcacctgttgccattccatttgtaggtgcaacatagcgttggaagttcataacaaattgtgggtttaaactaatccccaaatctttccatgttttggaggttaaggtataaccgcggcggataacaaacgggtctaaactctctttaacaaaacgggaaatactgccgttctcaccaagaatttgtccaatttcactacttgttgcttgtaaagaagctgatgagttaaatggatatttcttagcaagatttgcagtaaatggttgataggcttgcattacccatagcttattaatttcatcttgagtaggtgtaattaaactttcaaaggcttgggtaagtggactcaccactaatttttgtagaagttgctgatcaatttcactgaaaccaaccgccatcttttcatctacaattttttgagtctggttaaataccgatgtctgctcatttaaagtttgcttaaccaatgtcatcgcattcggtccgatctcacccgcattcttaagttcattaaacttactacgtactaaggcaagattcgtcatatattcatcaagcaaagatttaccttgctgatcatcacgtttacgaaccaattgatagaacatttgatattcttgagaaataggcccttgagcattcgttacagcctgatttgctaattgtttatcatcatggtttaaaaccttacgtttaaaccatgcaataaatcctttttgaggcgctgctaactctgcttgaacaaccggattatcccagtttgtttcaatggctacgcgttcaataagcatgcgaattggtgaattttgtggttcgcccaatacatcaatatttttaacttgctgagcaaactgagttgcttttgcatagtgaatgccacttaagaattttctccactctgcaatatattcttgtttatacaatgcagtaagctgctttctgatttgctctggactacctgagaaagttaaatcatcagattgacggctattaagcacccagtctttagtatccgtaggtttgtctgctgcttcctcaattgctttttctacatactcgttccaagctttttgagtaaatacccctggtaatgcataactacccaatacaatatttttatttgcgtcacctacaatctggtttacagttaaagctggaaagcgcacagcagcacgcattttaatttcattataaacacggtcacgtgctggcatacctctaataacagagagcaatacttgacgtgtctgatccacgagttgagagtcagcatccaagatcgggaattgtttatcatttgccaatgtcattgcataagataagatctgctcagcttcttggatcatatctgcacgtggcatctgccctttattggcatcaagccaagaacgccagaaacgcgttacctgatcacttaagtgacttgcatccatatactgtggattgctcatcattaaatatgcttttaaagcattataagcatcttgagggttggtatccgaaggctctaaatattgctgagtttgagcagtttgcttgatctcaacattggtatgatttgcttttaaagttgcttcgttattttttacacgttgcaaatactgagcaatattttgctgtgtaggtatcaaaacaatttgcttaacaccttttaaatattcagcttttaatttttcacgtagctcattaccttgatataaaccaaaactaaattttagtggtctattttcatcaaattcgtctaactgttgtagacgtctttgcaagataagtaaggcctctaattgagtcgacaattgttgacctgaactcttttccaattgaacaactttattcaaatcagcttgaacttcggcaataagttgttgattattacgatatgaccaaacccacacaccgagaataatggatacgcctgctaaagcaccaataaatgcaatataacgctgacgctttttgcttgtattgacatgctgtttaaccagatctttatcttttaaaatgacatctgaaaacaagccttttaagaaataaccatggttaggcgttgtttttagctgatcttttacttcactttgagcaatttgggaaagctggaattcctgtgcaatttgctcagtcattggactttctattacgccttcttgcaaagcacttgtgaaataaaacccacggaaaactggttggaactggtaagggttatcttcaaacaatgtcgcaataaaactttttaatgcaggttttaatgtcttaaattctaatgggaaagtcatcacactaggtgagatattttgagaatgtcgacggctaagatgagttgaactgaccccttttaaaccgtcataaagaatattgtagtgtttctcaaaaagatctacagcattatgagaagagttttgctcatatggtagtgttgcgccccacgcctgattatattcttgtgcttcatagaattcgaaaaattcggtaaaacccgcgatcaaatccatttttgaaaagactagatatacgggtacaaccacttctaaacgttcggttaaatcctgaatacgagcgcgtaaatttttcgcaagctttaatgagtgttcaggactctgactaacaagctcagcaatactaacaataagaattaaaccatttactggagccttagaacggttcttctttaagatatttaaaaagcctaaccattcagagtggtcttcgctatagaccgaataacgtccagcggtgtcgagtaaaataccctcagtcgaaaaaaaccagtcacaattacgcgtaccgcttaaaccagccgaaaccattttttgatgggtttcttcaaaaggaaactttaaaccagaattatagatcgcagaacttttaccagcagctgggttaccaatgaccatataccatggcaactcatatagtgctgcgttcccctttttatcgcctaactttgacttacgaatcaattgaatagattctttcatttgttggctaataagttgcagctcttctttatctttatttttgccgtactctgcttgggtatccttttcaatcgcttgtgcaagctcttcaccttgaacagcatgctttttacgctgaattagccaataaattccataagcgatgagccctaaagcatatgcagatgctaaagcccaaaatatatggcgaggaattgaagtataggaagacatcaatgccacgaacaatgacaaggcgataattgctttaggattcgtgatgtactgccacaagtagcctaaaattgtatgcattctattctcgttctaagttcaaagtttaaattagctattcaacaccatcgcatcatcttctgaattttcagtgacactctgcacaaatgtatgtgctgacactgtattttctccaaagacaaaaggaacgatatgttcaggaaaatgcatactaagcataaagccataaatatcaactaaatgctgggtatgccccaatgaagatttcacataaatatagtgatgtggttcaacagatgtttgtgcaaactgctgctgtaattgcttcgctgtttttatatctgtctggtctgaaagaataagtacgtatggctcatctccctcatactgcggtaattcatttaagttcagcgtatgaagaactttggctgctttttcttggcccaccacaatttttaagtttttagccggttcgagttcttcgatttttaatgatgggtccgcaaggaggcagcttgcagcaaattcagccggaatataatctttgaccatccatgatttttcatcaataagatcttgatcaatctctgaatcgacagccagcatgagaaatacctcatgctctttcttttgaatgcgttttaataaatgaataaattcttgataagctacacgctcacccaaaaagtgatattcgatatgaactttttgggaaataataccaatctcagtaaaaaactctaaaatcagatcattactttgctcatcattccaaacatgtaataaatcttctggaagaaaaatatgcaaattcagtcgatttaaacggtgtacttcaactacgggtgtttccacatcttcatattcgctatttggatcgacccatgcaggatgcatatgatattcacggatctgatgagattcataaaataaaattgagcgctttaaatgttcagccaagcgatacaaattctctatattttgttctagttgttgcctgattaaagacatgatacgaacttgtcttggtgaagcagcgtattgaatatcctcatcatttgtctcagctaaatctttaattcgataagataaaagaggcaatccatacgaattcaacaattgctcatcaagctccggacttttaaaattttgtatttcttcaataatagtttcattctcgcctagggcatgtatagcaaaagcggaatatacattaaaatccagctgttctagaggttgttcaattgcagcagatgatttttgactatcatcatcttgactttgatttgcagcctgctctttcttttctttgtagcttttataaacactataaattaaccaaggtgataagatcaccaatgtaatgattgctggcaataataaaaaataaaggaaaaagtcgattttatttgggttatattgaacatcacgccagtagaaaatgataattccactaacaactgtaaaaatagcgatgaatgagagtaatatttttttaatcatatttgctctccaataaggctataacatgtttcatcgttatgtgtattaggcttacgagacattaaaaaagcgccttgccctaaaccactttcttggccttgagttaagcgaacaggttgtatttcagtctcatccaatatcaatcttaaatctatcgataaagttggactgcaccaggtttctacgatttttttgagctttaagctaagctcttgatgaggtaaaaattttaaatattgctgacgcttaagcggacctatttgaatctcaatttttccatcaatttgttgaatcgtttccccacaaaatgtgttaataccaagtaagctcggttgacttccgcctaaagtggttagctgatcacccgctaacttaaacgattcctgtacaaactctttaattgtaatttcatgcttaaaaatacaactcaacatcgtctttaaagcatgaaccgtattattttgcccctgcattaggcctgaaaattcagcgaaatattcatccaagtcttgttgctgatgttgtgagcgaacataaccattcaatgcatggagaatatccaaataatcatttttattttcaatttcatagcgcacaggcaagtgataagtaatacttgactctacatactgactggtcagcttatgattaaataagcttaaaaactctttcgtttcagcgcgttgttgccttggagcctgcttaattttatttgtatatgtataaggtaatgcaccttgtataccagtcagaccaacgatcaggtttgttaaatgaacacgttcatctactaactctaaactttcaatttcagtggctggaaagtttaagttaaatgaggtctcaaatttaaaatggtcagaccatgataaagctgcgtcattggcaggcatatgacgcaataaacgtgttgcttgaataaactcaaaagacttagggcgttgaaacaactcagccgttacagaagagtcttgccaccaacgttctgactgcattggtataactcctgctgagatgaataatccttaaccaccaaatcaacaaaactattaatttgaacctttaaattaaaaacacgacttaataactgactaaaaatatataagctatgccctctaaatacggatgaatcaatttgtaattcagcttttactcctcttacaaacattggaaatggtttgccatctacgagtttatgggtaagagaaaattctaattttttaattgattctataattaaatagttttcttttgactgcggtaagttatataaagccagcagctctttaacatgagaaacagcatcccctttcataagtgctaagctatttaatgaaagatgcgagatcacacgccactgttcactttggccttgttcaaacttataaggctttgtaggtcgttttaaaacaatggcacgtctcgccaagctactatcatttaaatttaatacgttattagactgacccagtgcttcatgaggtaaatcacggtttgaacataataatttagtgctaataaaatctgagcgcgttgaaaatggatttaaatttttagaaataatcgaatagcccatttcaacgaaattggactgtaacttttgatagtttactgagtaaaaaaagcgagctgtatcattgtggtaatggctcatcgcaaaaaaaggcaaaacaggaacatagctttcttcctgatttgttttttcacgcaccatattcatctcaagtattgaatatacttgataaaattcaggatggtgagcgtctgtaactaaaggatattctaattgcttgtgaactatcttctggggttcagcatatttttcaaataaattaattacgggggtagtaaataatttaaagtttgcaatatttagctcagaatagtttctaacaacggcttgatcatttaagtttaatttgaaatgaattaaaagctcaaattcggatacatgctgaggtagtcgccttaaaaaatccaaatcgagcttaagataactaaacttttccgggaaacaaaagtattccatcaacaaacgataagcatgatgggtatgttgatcaagcggtaataaactttcttgttctgcaaaaccaatcaattcaaatggattcttgctcaattctacaattgtttgtccatatttaaccgcaaaactggttccttttttgaaaatactatcaaggacctgtagaggaaaattagagatagcatccaaataaataggaagcttctcatcagttaaacaagcatgagcattattaaaaatttcaaatttaaggctcaacgtcgcattttgatttaagtgcatatgtgcactaggtgtagttttaaaatctaaaccacttaaatgaataggtagtaatttaacctcttgagttgtattaaactcacactgtactcctttgaaactacgagatttcaaaaccgtatgatgaggtacaagatgaggttctgtaagctgtttaatcttattaatatcttcaaagctaacaactgaacacgcaggaaaatgccgtaagtattgagggaacatcacctcaaataaagaacgagtaaaaacatcgtaactgtctgttagttttttatcgattcgagcagcaatcagcgaaaaagcctgaatcagacgttcaatatgtgggtcatcaatttgctcttgatttaaagataagcgctgagcaatttttggatatttttgggcaaattctcgagattgttgaccaaattcttgtaattgtttttcataaaacggtaaaagctcttctatcacaacacacccactacgcttaagttcttgctgaaattacatattgctgcgttgttggttttaacaatgcatcaaatacaacaggttcatataaggggtgaatatttagataagcctgaatacttaaacataatgcgcccatattatgtccatctaataacatctctacccgtatttgtcttagccgaggttcatgagctgctattgattgctcaatggattggcaaattttatcccgatccagagggttggctgtagaaagccccacaaaatcaataatcccgaactgaagtatcgatttttttacaagtggatagtcatcaatcacatgatctaactttgctacccgactattgagcaaatcttctaaatcctttgctacagattctcttaattgctgaatagaaagaccttttgcataatcttcactttctggaattaaacgatcaaataaagttgaacgaaatccgtatggataaagccgatctaagttcattcgagttcacaacaaagtatatttaaagacagcagaggctaactttatgtcagcctccaccaaatattcacttaaataattacgctgcgtaagaagctgtattattagaaagtgaccatttcttagtaacagcacctttagcagtaccgttaatatcttgttggttataagtccactcaacagcagcatatttcaaaccgaatgcttctgtaggaacgccttcttcgttaacagttggagtcacactagaaactaaaacgtgcttcaatttgatttgtaagtacttgatacgtttatcgccatttgcgcgatagaagtcgatttgtacttcatcaaatgtataaccagctgaacaagcttcccataatttagggctagttgcgtctaagtctttcacgaaaaccatgtcagaatgttcaacacgttcagcagtgtggccgcctacactacttgaagtagcagatttaggttgacggatgttatgagaccaagagttaacttctaaccaacctttgtgctcagaatcacgagattctccatcaactttatatttaccgcgaaactcaacgtatatatctttcatttagaactttcctatttttaatttaaagttattctttagctgaccttgattaatttgaggactgaggtaactcagtgacaagtcgtaaagaaaccgacaactcatccagctggaaatgtggtcgcaagaaaaccacagatttgtagtgacctggttgagcaggatcttctacaacttttacagacgcttcacgtaacgggtattgagcttttgcttcttgagaagcaccatcgtcaagtaagacatactgtgacaaccactcatttaagaatgcttcaacatttccagcagaagcaaagctacccactttatctcgcatcattgcttttaagtaatgtgcaatacgtgaaacagccatgatgtactgaatctgacttgataaagccgagtttgcattggctgtatcattgtcatattttttaggtttttgagttgattgcgcgccaaagaaagctgcgtaatctgtatttttacaatgtactaacggaatgaagcctagatcgcttaactctttttcacggcgatccgtgattgcaatttcagttggacacttgaataccacttcgccatcttgtgttttaaaagtatgtactggcaagccttcaactaaaccaccaccttcaacaccgcgaatagcagcacaccaaccatgcatatcaaatgcatttgttaagcgagtaccaaaagcataagctgcattcatccacaaatattcattgtggttttcaccagaaacatcttcaataaaattaaagccttctgtcgcagtaccttcttttggatgatatgggagacgacccaagacatgaggcaaagtcaatgcaacataacgtgagtcttcactatcacggaacgaacgccattgaacatattcagcggtttcaaagatttttgaaacatctctaggacgatcaatatctgtaaatgattcaaggcctaaaatgctcggactagcagctgaaataaatggtgcatgtgctgccgctgcaacatgagagatttgctcaagcaaatacatatcagatggagtacgatcaaactcaaaatcaccaattaatgctgagtatggtgcaccaccaaaagaaccgtattcttcttcgtagattttcttaaacaaagtgctttgatcaaagtctgtagcaccttggaaatcttttaccaactctttcttagtcgtattaagcatacgaattttaatgagcggatttgaaggcgtttcctgacaaaagtaataaagaccacgccaagttgactcaattttttggaattgttcattgtgcatgatctgacttaactgctttgaaatcagagcatcaatttctgcaatacgcttatcaattgataaagtcatattttcagaaacagtaatggtccctgccattacttctttagcaagctcaccaattaagcttttagcacgagaatgttcttcttcatttcgtgcaatacggctttgttcaacaatcgaatctaaaagattaacttcttcattttcaacaagtggcattgctgctgattgagtattattcatgatcggcctcggcacttaatttacggatttgatcagtatttttaagaacctcatcaagcagatcttctaaacgctcactgtttgaaattttgtttcttaaatcggttaaacgctcacgcgcctcaaccaatttctttaatggatcaacttgctgtacaacattttccgggcgaaaatcttccattgacttaaacgttaaatcaactgccattttaccgccttcttctgtcaacgtattgtctacttgaaaagcagctcttggagacagagattccattacttcatcaatattatctaaatcgacattaatgaattttttatcttttaattttgtacgctcaagctcagatgcagctgaaaaatcacccattacacctacaacgaatggtagttctttcgcttctttcgcatcaccaatttcgacatcatatgtaagctgaacacgaggaggtcgaattcgctgaagcttcttttgtacgctttctctcttagccataagattctattccggattatttaattaaagggtcaaaaggcgaactttttgatttattgacagtggctgcaggtgcagttttaggtttgactgcggtggcctttgctggacttactactcgtttatttgatgttctagaggcactcactttattacgcgttgcgtactgttttttataatttcttttttcattatcagtagaactgctttccgagttgttagttttgaaactggatggatcaggagccggcattgcagtatgaatattttcaactaactgctttgcaggaggatatgttatgtcattcgttaaatatcgcatttcctgattacgcatttgttgcaatgagttatttgcaatgctcacaccagataaaaataagacatctgtgattaatgaaccgcgtatattttgactttgcaattgacttgctaaattcaatgctttaactggttgattggtttgataaaaccgcatagcagctttagctaataaatcatttttttgagttgtattatcactatcacaaacttgtttaaaaatattcaatagctcagggtcattttggccttctgctagagggttcttcttaatacaactttttttaagttttacaggctctagttctgctgcttgagcatatgatagaccgataatgtttccagtcaaaaaaagtatcaaaatacttcgtttcaacacaactttcattcctctgttttcttatttattcaaggctttaccgaaaagttaatatttttagaatattaaaaaatcagtataaaaaccttatattcaaaaaatttagtcgcagtttaacatataaataaacatattttatataaaaaacatattaacttaaactaaaagctaatagttaagatgcctataaaatatagcttaataaagtttttcttataaaaaaataatattgttaatttttgtaaataaaaataaattattgatttttattagtttatttaaaaattaaacaaaattaaaaattgatttaaatatcatgagattaggcattatgaaacattttcttaagaatatttaattataaaggacatctaagttaatcctatttgattagtatcgatacagcccactttacaaaaagacaggctctacataaagtccataaaattgtcaagactaatctgtctacctatcatatttttttaaaattaatttaatgcttccttagcactaaaaaacatactttccctacataaccataaattttctatattttttgcttaaacatggctttagataaaaattacaagtaattatttttggttcttgtaatggctcagaccaagagaagtttattcaacctaaattttattttctcaaaaattgtagttcttaactttatagctcatatgaattaccaattttttcaaagaaattaatactacccaccagtatccaaaatatctggctattttggctgatatagataccctcatagctataaaaaaagcaatatttttaatctgcgaattaatcatgacttgaataacaaatagattggttcatttatgctgctttatacaaaaagtacattgttggcaatgattagcggcagcttgagcgctaatataaatcaaatcaattcatcgattgattgcataggttaagattgttagaagagaatatggtctgaaatattaatcgataaattttatttagtaccgtctatacatcacaattccactattaacatacttttttaattgcagctttgctctgcttactttcactcattcccgttttaaaggagaaaacccatgtctaatcaaatggatcaggccattcaaagtgtcattgacttacatgttttgatcgaaaatgtttttacaggtcaaaatgcagaacaaagtctcacaccacttttaaacagttttgatcaaaattttaagatggttacggttcaaggtcagagtattggtttagccgaagttaagaacttatttagtcaaaatattggaaaaaagccctctttaaaaatcactattcttaaaagcacagccttatacgaatttgaaaattactgttgggtgcaatatcaggaacatcagcaaactgatgaaaccgaaacagtacggacttccacagcctgcattaaagtagaagacgaaaaatgttattgggtttatttacatgaaactttagttccctcatcttcttaactcatctagagcaccttaaagatggcacctattttgcttaacaatattacgttttatgaaaatcgtaatactgatcaaaatggggagctctcgatatgggttatgttgcaaaggaatttacgcaaaagaacaagctgattctcagtatttgttctttcgtgattccaatatgtctttggtgcgcaatcagttacttaccttttgtttggcatcctcaagtacaaatcacaagttcaggcagtgttccttacttacaagtaggaagtcgcgttgataaaaatgtgttctatctcgaagcacaaaatgcagtcaatcgaaattctgcaccaccacaaggtattttggttaatccaatttatttacccgctccccatgaagtcgctaaggctttggtcactgcatttaccacaccacctgaacaacctgattcgccgtggtttcatcaaagtttatggcacagtattaaactggtattttcagctttttttatctcttccttaattgggattccactgggtattttgtgtggtttttctaagcggatatccttgttaacagaaccgtttgtcgagtttttccgttacttacccgcacctgcatttggtgcgcttgctgtggcaattttagggattaatgacgcacctaaaattgccattattgtgattggtacactctttcagcaaattctcattattgccaataccacacgaacggttgatcgaagcttaattgaagctggctatacgcttggcaccaataagctcaaaagtttatttcatgtggtgattcctgctgccttacctgatatttaccgtgacttacgtgtgctattgggctgggcatggacctatttaattgtttcagagttgattggtacgacctcgggtattacatggtttatcacccaacaggcacgctatcaaaactttgacaatgtctatgcggccattttgattattggggtgattgggctggtctgtgattgggtattaatgaagttaggtgagcggatgttcacttggaaagtaggagcaaaataatgaacgattcaacatttaacgcacatgaatactttcaaaaaatttatgaacgtcctgtgattttagaagctaaacaactgagccaagtttttaaacatggtcaaactgaacatactgttttaaataagctcgatttaaaaattcataaaagagaatttatttgtgtgattggtccttctggctgcggtaaatcgacactaagccgtgttattgcaggtttagacccataccatagcggagaagttttagtagacggcgaatgcattacaggcccatgtcctgaacgcggtatggtgtttcagggctataccctttttccgtggaaaactgtaaaagaaaacgtaatgtttggtccgcaaatgcgcggcgccagtcaaatgacagccgaagctcaagcacgcgaatggatcaatattattggtttagaaaaatatgaaaatcagtatccacaccaactttctggtggcatgaaacagcgcgttgcgattgctagagctttagttaatcaacctaaaattttacttatggatgaaccttttggtgcgctcgacccacatactcgccaaaaaatgcaaaagcacttaatggatttatggcaaaacattgatatcaccattatttttgtgacccatgacatggatgaagccattttgctggcagaccgaattgtggcactcaaagccaacccaggtgaaattaaggaaattattgaagttaatttacctcgcccacgctcactcgatttaatgagcacacctgagtttaaacagctccgttcacgagttgattatctggttcacgctgaagaagacgagcttgaccctgcgttgcaagacctaccaaaaataccgcgtatgactcaggtcagtacagaaaaataagtaagacattaaaaagcccaagttcaacttgggctttttgctttatggagcttatttgagttgttcgatgagtgttggataaatcagcccatctacattttgttcagttttataaataccgttttcaacgttaaatttattgacgtgatagctagagccataaatcgagtcaaagtcttgagatttagtaaatacttttttattggcattgatatctaataaatgcgtaccgctgaccatcaactcatattgctttggatcaacccctgaacggtttgccataattttaaccgcatcggcatgggttgcagggtcattaatatatttaactgttttatcccacacttgaatgatttttttccattcgtcttgatgagctattaaatgactcatgttgactgttaaggtgtcgtaaattaaacccggcttgtctttagaggtatagataattttagagcctgccactgcttttaatgcctgccctgcaatgggttgccaaacagcaatcgcggaaatatctgggctattaaacacttgaggtagttggttcgtcgctgaatttaccagcttcacctcattcgctttaatgttatggtcggttaaagctgttgccaataaaagatggtcaaccaagcctttttcgacaccgatcgattttccttttaagtcttgaatggtattaataccctcttttgcaataatgacatcattgcccgcagaataatctgttgccatgatcatcatgccttgcgtaccgcccgaagctgttaccaagttatcgccattggtgaccaacacagcgtcgagctgatttgccgaaaaggccgaaagagaagccgaataatcaaaccatttaaactctacatttagccctgcttcttttaaccagcctttttcaatagccacttgccaagccacccagcccggccaatcactatatccgatggtaattggttttgtatttgcggctgcctgagcatcttgtttagcctcggacactttagcagtattgtcacacccacccaatacaactgccgataaaatagatacggataacaacgcttttttaatcatatagaaacttccccaacatttttactaacaacactttgagcggtttgattgagtgactgtatataagctcgccagcctccaaaatggctaatatcggttgcatcttgaatggcataagcctcgcaaataaagcctttgacccatgttccatcttttagtttcaggttccctataccaagtggtgctggaacttcggccacaatggcaccaaaatttgctaaaggaacatcccacacttcgacttcaattgatgtccctgctgcatcacattgcaggccaggttttggtggcgaggtattttttaaggcaaagagtttataagtctctgcggtctgggttttcttaagtaaagttgcattgcggctagtgagctgaaaattaaggggcatgcctgttaagtgtgctcccacaacggcaagctgtactgaatgattcgactgaatctctagacttttttgataatgttgagttgatttacctaaactcagcgatgtttcggcttgccaaagctgcgcaaaattggcgagtgcctgatcgtgccaagctggtgcaataaaggttattccacttggtaggccgtcttcacgaagtatattaggtaaagctaaagccgaaagatcggcaaaattaacaaagttggtataggcccccatgtgcgcgtttttagtcaacgggtcggcttcaacttcggcaatggtgtaaatggttggtgctgtcggaaccatcaaggcatcaaaaggctgtaatgccaaattaatttttcgagccagaacggcacggttatattcggcttgaagtgcatctgttgccttgaatttatctgcctgcgcaataatctgggcaatgactggatgagccttttcacgtgttgtcatgcgttcaacggcgactgttctttctgccacccatgcatcgttatacagtgcggcagcaagctcattaaacgcactgaaatcaatactctcaacttcgtaacccagttttttaacacgctcgactgcaactaaaaaggctttttcagattcaagatcgccataaaactcaagctgagctggaatagctatttttcgtttagaaaactgagtcggtacattggctggatgtactcgtgaatattcatctgtttcatcgtatccctgcattaaactggcaactgtccaagcatcatcaatatgcagcgcaaaaatagaaatgacatcaatagtccgacatgcagggattaaacctgtggtagaaaaccagccctttgttggtttaagacccacaatattgttatggcctgcaggaacacgccctgaccccgccgtgtctgtccccaaactaaaaggcactataccgttggcgaccaccactgacgaaccagaacttgaaccaccgctgatatattcggggttaaaactattttttactgcaccatagggagagcgaacaccaaccagtcccgttgcaaactgatcaaggttagttttacccaccacaatcgccccagcttttttcagtttggcaacgacggcagcatcttggtttgctaaatattgaacttctttacaggcagcagtggtgtgaaagtcagcgacatcaatattgtctttgactgcaaatggcactccgtatagaggtaagtcagcaatattctgatcttttaaaacatcaatttgtgcctgaatctgattattcgatgcaatttcaatccatgcatggtcatcgtttttaatttctgccacatagccaatcagatctgcaagatggatttgcccgttttgatatgctgttttccagtcttgaatagtccataaatttttcaacacgctactcctcatttagtcattttgctgtataggcggcataacggcatccatcagttctagatgtcctttgatcacccctttcagcacaataaattgctggctaatttgtctaagctcagaactcgcgccctgcattaacatgacttgcaatatcttttgttggtcgagctgaatatgaagtgaactaatcacctgtgctaaaaactgttgttgcaagtcaaccaattgattgcgcaaggtcatttggctagcgtcataaagcagcgttaatgtgcccaccatgacttcattggcctgtgcttgctctgcaatcaggtgtttattaatcatgtcgacaatggcttgcgagcgactttcatagttctgctcgacaattttttggtcgagcgcgttgagggtcgattcaggtacggtaatactgattcgagcaagcttttgttttgccacagtcttatccttttgttttaggcagctgattgttttgtttgatatatacgcctgcgcgtacgctgagcaactggactaaaaaggcttttaaagtttgctttggttgaaccacaggttttacatcgttcatatcacacctctagcttggtattaccaaattcagtttttgtattactaataagagatgcagaaaatgtgccagtttttaagcgtggttttgatgggcttggtaggaatttatgagtgatttttgggcaagaaaaagccccatgcacagggatggggctatctcttttaatccttagttatgtttcaataaatcattctgattaaaaaggaatccatctttaggagcctctatctttatattatttattaaacttttaaaatcattaatcgctttatttgtatcattaccttcgccttcatatgttactaagataactccagcattagtacctgatgaagcactaataagaaaacgtttatcaaagttggttgtaaatacattagcttgataattcataccattactcaatggaatattaatatcctcattaactaatgttacccctttcattttaactagtccttgtttaggaatttgtagagaagcaaccagatattgcataccctcttctatacctttgggataatatattgaaattataattgcctgtttactcgcttgttttattgcaattaactcttcattttgacctttgctaatatcccactgatcttttaggttaactacaatatttttatattttacttcttgagcataagtcggagtaagtaaataaaaaaacataaatgttagtaataaaattcttttcataataattccatttttgttcttgaagtatcatattaaatatcattcacggagtcgaatctattccataatttaattttgtctttaatcttatggctaattaatcatcgtatgtgcccataccgataaagactctaaaacaggcttaaaagattggcctaattcggtcatttcataaaccactttaatcggtgctttttcaccataaacggttcgagagattaagccactttgctctaattacttgagttgcaggcttaaggtcatttctgtaatggttggcattaattgattgatttcattaaaacgttttggtccatcttttagataatacaaaataacacctttccattttccacccactaaatccatagccatactgatatgacatggatacgtttttccattcatggtgatttcacatttattttcagtatttgccatttttaacgccacctatcaactttgatagttattgtacgctaatactataaaaattatagtgactatgatttttatagtttaaaggcactctcatggctttactgattttagctcatccctactacgctcaatcaattgcaaataaaacgattgtgaatgaactcgtaaaaacctatccggaccttgaagtgcgagatattttccagctttatccggactataaaattgacgtgagtgctgaacaagaagccttattacgccacgacacgattattctgcaatatccaatgttctggtttaatatgcccgcaattttgaagctatggtttgatgaagtttttacttatcagtttgcttatggctctcagggcgacaaattaaaagataaaaaagtcattattagtatgacggtcgggcaaaaagaagcgaacatggtgaacgaccaagaaaacttaatcgatagctttttaaaatcagttcaacattcaattcaatatacgcaaatgcagttaagcggcacatttttgctttatgacgtatcgccattatcgggtaacccagagtcgaaaattaaattagaagctgttgaacatggccataaagtattaaaacatttgaccgaagcataataaaaaagagagcatcaatatcgatgctctcttttagtttaagcgactggtgccaaagtaaatagcacttgtcctgtttttacggtttgtcctttttcaatggtaatggtttctactttcatgcgttccggcgcaataatcggaatttcaattttcattgcctcaattaccgcaagggtcgcaccttcttcaacaatatctcccgatgcacattcgattttccagattgaccccggcatgtgtgattcgactgcacagcctccttcaggaataaccacggtttcaccttcatcaacagcatctaggctttcagagatatattcttgtaagcccgcttcgtgccaacggcggcgttcagcctcaaaattggcttgttgcatatctttaaaggcttgaatgctatcttgatgtgtttttaaaaactcgttgtattcttttaagttaagcacaccatcttcaatacgaagttgtagtcggcccgccttaaagtcttcacgcatttgtagaagttcagtctcagaaacttcataaaacttaacttggtcaaaaaagcgcagtaaccacggtttgccttcttcgaagttggcatttttacggtaacggctccacatttgggtcgtgcgaccaacaaactggtagccacccggcccttccataccgtacacacacatatacgccccgccaatgccgaccgcattttcaggtgtccaagttcgcgcaggattatattttgtggtgactaaacgttggcgtggatcgagtggcgttgcaacgggtgcacctaaatacacatcgcctaaacccatcaccaaatagtttgcgctataaaccacatctttaactgcttgctttgaagctaagccattaatacggcgaataaactcgacgttatctgggcaccacggtgcatctggtcgaacaatttgtgtgtagcgctcagttgcaagttgagtctgcgaatcttcccaagccaaaggcaaatagacagtccgtgaaggcacctgcatattttgaatatcgggtaattcggcttctgcctgttgaagtttctgtaaaagttcaagttgatcgagctggattgaattaaaatgaatctgtagtgaacgaatacccggtgttaggtcgataataccctgaatgttttgatctttaacccattgcatgagtgcatgaatacggaaacgtaagtttagatcaagtactaactcgccatattccaccaacaaatagctatttcctgctggtcgataggtcacgcttggtaaaccagcgtcaccgtctaaagtagctaaaacggcatcttttaaagtatcgggttctgcttgaatagctggattaaaaccgatctgagttgtatcagtcgcggttaagctttgataatatttttgatcgagtgcttttgcttgcgcataactcacgggtacaaatttgaccttgtcgcctgcttttagctgcccgattttccaaagctcggaatgaatgactaccgcaggacaaacaaagccgcctaaacttggaccatctggacccaaaataattggcatatcgccagtaaaatcaattgcgccaatcgcataagcattgtcgtgaatattggagggatgtaagcctgcctcaccgccgtcttcacgtgcccactctggttttgggccaattaaacgaatgcctgtccggcttgagttgtagtgaatttcgaactcattggcaaagaacgtatcaatatcttgtttggtgaaaaaatctggtgcgccatgtgggccatacatgactgcaatttcccagttttgggtaaagctaggaatttgcgcttgagctaaagctgtagtcgattgagcggaatattcagtaattggcaacatatcgccaattaatagattacggcctgcatgcccaccaaactgccctaaagtgaaagtcgcctgtgaccctaaatagtcaggaacctcaaagccacctttcacgcctatatagctacggcaacctgaacggataatcccacattttaaaatctggccttttttcacattaatggtttgccacatcggcacaagttcgccatcaagttttgaaggcatgtcaccacccgtaatcacaatttggctgtcgcagtgaaactttaaagttggcccttgcaaggtacattcaagccctgccgtatttggctcattggctagaagctggtttgccaccgttaaactgagtggatcgatggcacctgatggcggcacaccaacatcccaataacctaatcggcctgttacgtcttgaatagcagtttgaataccagcctgcaacacctcaattttttgagttttccattcaaacgtatttaaaaatcgagtggtttgagtacctaaagcaaacacatcacaagcaataatgttttgcaaatattctaaattggtttcgatgcctgcgacttgcgtgttggcaagactggcactcattgcctgtatagcttggtcccgtgttgcagcagtcacaatgattttggcaatcattgggtcataaaaagacgacaccgttgaacctgtttcaacccatgtttcgactcgggcttgcgggtcaaatttaacatgtgtaagcaggcctgcactcggctggaactgtttaattgggtcttcggcataaagacgaacttgaatagaatgtcctgttggctctaacttttcagtcggtgcggaccagtcaccgcttgccaaggtaaccatccattcgactaagtcgacaccaaacacttgttcggtcacgccgtgttcaacctgcaaacgcgtgttgacctctaagaagtaaaattcttgggtttcggtgtccatgacaaactcaaccgtgcctgccgagcgatagttcaccgattgcatgagttgaatcgcaactttttgcaagtagtcgcgttgctgttcatttaaatgtggcgcgggtgtttcttcaatgactttctgattacggcgttgtaccgaacaatcacgctcacccaacgctaaaacttgccctttcccatcaccaaaaatttgtacttcgatatggcgtgcatgttgtacaaatttttctaaatataaacctgcatctttaaaattgacctgcgctaaataagatacggtttggtaggcatcttttaattcagtttcattccagaccagacgcataccaataccaccaccgcccgcggtacttttcagcatgactggataaccaatacgagcagcttcggtcaaagcctcggcttcatcggaaagtaatgagctacccggaagtaaaggcacattgcttttaatagcgagttcacgtgcagtatgttttaaaccaaaatccagcatttggcttgaagttggcccaataaaggcaataccttggctttcgcacaaatcacaaaactcggcattttcagacaaaaaaccataaccgggatgaatggcttctgctcccgactgtttagcaacctcaaggattttttcaatatttaaataactttgatgtgcaggtgcagggccaatcagaaaagcttcatcggccaaagtcacgtgtaacgagtcacggtcggcctcggagtaaactgcaactgaagcgatcccgagttttttaagggtgcgaattacgcgacaggcaattgcaccgcggttagcaatcagaacttttttaaacatgcttacaccccttccgcttcacggacaaccagttgaattttggttgggttataggcattacatgggttattgagctgcggacaattggaaattaaaacaattaaatccatttctgcccgaacttcgacatatttccccggccctgaaattccatcatcaaatttaagctgaccgtctggtgtaacaggcacattcataaaaaagttaatgtttgggccaatatgacggacatttaagccatgcttttttgcaatcgggtgttttgccaaggcatacataaagttgttacggcaactatgcattgggtaggtttcatgtgcatagcgaactgtattactttcacaagaacaagcaccgccaatggtgtcatggcgcccgcagttatcatcatgaataacggctattggacggcccaaattactgtagagtttggtgcccttttctaaatagatttgttggttgatagccaaggtatccattgcgctataacgctcagtcgggttttctgcactcataaataaagtatcgactgcttggtttccctcaaggtcaataattcgaaaatattggccttttttaacctcacacatccacgcttcgccagcaggacaaacttcatttaaaactgctttttcaaatgattgtaaaactgtcatgatgcttctcctgatttaaatattgctaagtgcgtagtagcgggctgtgttttgaaacgcgcgctgattttgcgaacatgcatcacgacaaatatcgctgtctgttagagaattggctttaaataaactgatttgaatatcggcgggttgatagattgggctggtgtctaaaccatgcggcgcagcagataaaaatactaagcagtccatttcaaaacgtagttcaatgttttgattggtgttatcagaactgacataagacaaagcgccgttttcatctggtgcaactttagaaaataggttaaccgtggcactgagatcttggctggcaagtccatatttacacatttcaatcaataagctgtctaagccgttttggtacatatcattgcgggcgtcttgaaatgtacgagtaccgaattgcttttcaatttgttctggtcggcttgggccacaaagtgcatcattccaaccatgatcatcacgaacaatggaagccatgacacggccaaggtctgagtacaatacgttggaagcttttaaataggcagtgtgttgcccttttaaactgtcgggcatgttgaaacgttcaagcacatcggcagcatttacacaaaacaaagaaacatttgcctgagcgccaagcgaagtaaatctaagaatagttcccttttgaatacgacccgaccagtgatgtcctccgggtaaaagttcggtccaaatcgcctgattgttatgataacttgcagtgttcatagctactcctgtcggatagttttagacttcctcccgggcttttatccctccgtgtagttcgctaggaaccgtgaactctcggtccagacatactgtaagtatcggaaccctagatcacttttgattgtttaagactatgcaaaggacatgccagctgagtattacgttttttgtgaaaagtaatactcaatttgagcaaattgggtgcgctttaggttcaaaaataaaaagctgcactaaaaattgtgcatttcaaaataaaaaagccccttttattaagaggctctagagtgaaattataaggctgagatttttaaggaagcagaatcaccttacggcagtcctcttctctttcattaaaaatgcgataaccttctgcggcatcttctaatttcattcggtgggtaataatcgtttcaggtgttaattcaccacgctcaatcaattctaagagttgcggtaaatattgatgcacatgagtttggcccattttaaaagttaagcctttatcaaaagcatcaccaaataaaaaaccatgaatcgggcctgcatagacacctggtacgctgactactccaccacggcgaaccgcggctatacattgacgaagcgctgcgccacttgaaccttcaagttttaaattggtcaggactgtttcaatgacactgccttttgcctcgaaaccaatcgcatcaattaccgcgtcgacgccacgataattgtcggtattttgaataataaattcggctgcatcgacttcatcaaaattaaccggaatagcgtcataggttgccgccgcatagttcaatcgatattcattgtgatcgaccataaatattttttcagcgccaagcatcttggcacaagcagcacttaatagcccgactggaccagcaccataaattgcaacggttgagccacgtttcacttgggcattggtcactgcctgccaagccgtaggcaaaatatcggtcaagaaaagcactttttcatctgacagtgagccgggcactttaaaaggtcctttattggcttttggtacgcgaacatattctgcttgcccgcccggtacccccccatataagtggctatagccaaataaagctgcacccggtggaatctgctttttattgataatcgcgccgcgccctgtattggtggtctcacatgcagcggtcaggtcgagttggcaaaagaaacaatcaccacacgcaatcacaaatggcacaatcacacggtcgccctttttaactgcggtgacggctggaccgacctcttcaacaatgcccatgaactcatgcccaaagatatcgccatgttcagtctttgggattttgcctcgatataaatgtaagtcggacccacatatcgctgtggcagtcacacgtaaaataatgtcatctggttcttgaataatcgggtctgcaaccgtttctactcgaacgtcttctgcaccgtggtaagtaagagcgcgcatttgttattcctctatttcctataattgtcatttgattatgaggaggctttctttacggtttgcaacgattgttatttttcacgtaaggcatattgctcaaatgcaaatgaattaaggctccacttctaacaaaaaacgtgcaatatagagatgaaatcacgccgacgaactagaattccagcctagtgaaaagcatgctaatatccaaattctgacaattactcatgtcaaatttactttagagggaacaagatgttaaaaactcaaaaaatcaacatcatacaagaatttgatgcacccatagacaaggtctttgcagccttaagtgaacacgaaaatctaagcaaactttttgcccctgctaaagtcactcgcattagtaatggtaaggatgcgcgtaacggcgttggctctgcacgcaagatgtctattccgtttacaccttcatttgttgaaacaaatttagtctacaaagaaaatgaactgatcgagtacgcgattacaagcggcattagcccaattaaggcacaccgtggtgtgatgcaatttacagacttgggaaataaccgaactcgtttaaattacaccattagctttaaaggtcgcgttccttttattggcccaattattaaagcggctttacaaaatggcgtgagccgtggccttaaaaaacttaagttttaatagcctcatacccactaaaaaagcccagtgatgggctttttattttagtgtttctagacttaatactcagacagttttcttaaaaaataatctaataatttatctcgttcatctgtttcctctttacttaacaactgaaccattgccccatcaattgcaaatagaaacatgtgagcatcttctattaaggctgcgggtttgacggttaaaagtaggccatgtatttgggtcactagccagtttctataatcgaccaccactttgtaggcagtgggataaaacttttcaatttcaaaaatggccttaaaaggcaaacggtacagcccttcgaggttggcatggagataaaatatttttctcagcttatcaaacaccataagttcacgataagaatgaataatagaaaatacttcttcttttaacccatctttttgaaaggttaaacacatttcaatgagcctttcttttgaatgaaaatggttataaaacgtggctttggtcaccttagattcggcaataattcggtcaataccaaccttgtgaaatccatattggttaaataaatcttttgctgtgtgaagcactctgagtgctctaaatgaagcttctaaatttggcatagttataccgtttaaaataattttttgttgtatataaaagagatagtcatgccgtcactcttaaattgagtgctaaatacaggcatgcaaaagccgcacaataaagatgtgctcgcctatctcgggtttattgttgctatgattttttagtcgtaacgatgtttaggtgtaaaaacctagagtcggttaaaccaatttatagagtatttaaacggtataaatagagagattttggcaaaggccaataaatgagaagaaatagtacgcatgagcgaactcctttggctataaagaagtttcaccacattactgtcaaataatggtggtgaaacgagagaaggttgacagactgatagccaaaagatcagcacacccgaaggtgtccccctcccgttccaccgcagagggggcacgcagggatgcccacaaaaaagagagactttttcgtgtgcgttggctatccgacctgtcaaagtcgactggcaatgtaggccagcaggcaaaggatagtattcgcttttcttgtcgtcaagcgtgggaaatgacaatcgtattaaagtagagcggttggggaaataaaagctattacggtggagcaaatacatataattttaatatattatttttttaaattattttaaaatcccctcaactccttaaaccggaaagagtaaatcatgccttttgtgttacctctaatttggtatattccatattacttgtttttcaatttagtctttctcattcctatgtcactattaatttttattttccaattaatattagtttttttctttggagacaataaagttacaactaatatttgtatgacattagcttttttagttcttatggttgaattctggctaatttatagagcatcctatataaaaacttttgaacaacgaaatttttttcaagctgcaaaagattcattaattgagcttagattaggtttgaagatgattttaaaaaaataatagtagcttttataattttgactactcaacaactttattaattaaaatattatctgattgtattacgacttaatcagataatatttttacagcgatacaaatcgcaatttctagaaaatagatttgtacttaagattagtaatattttttgataacaagtgagtgatataactctatactgttatattctatagttttaagagtcatcttcattttttgataatttttctggcttcccgcaatgagagcattgttttctgaagataaaacttagcccattaacaaaagaacctagatcattcatgaaaaaaccacatttacaccaagggcatataccgttagctagcagcttaaacatcaaaaataatatgataggaatcattactatcggaaaataaatagataagtacttttcatctactcttgctagcatcaatacaacaataacaactgatggaactaaaaatactgagagtacaaagtttctacgtaaacgcattaatcgcaagtattttttcattttctcatcggcaaattgtttttccatttatattcccatttatttaaaatttctctttcaaatcgaccgcagtaaatacctattcaatcttctaaaagactgtctacagaaatacaccctatttttaatataaatattaatttttagtgagttttacaaactattcttcaaatagcgataaagcatctttattgccattttctgctgcttttcttagccatttttcggctaattcattattttgttgtacgccttcacctttatagtacatcatccctacagtaaattgtgcttcgtcattttcctgttgagcagctttgctataccattcgaatgctttcttataatcttgatttacacctatcccaagagcatatatcgcccccaagttattttgtgctttttcatttccttgctcagccgctttgctatataactcaaaggcttttttattatttagctctacgcccttaccttgtgcataaagtgctgcaagattattttgcgcatcggtataattttgtgcagcagctttgctataccattcaaaggcctttttataatcttgggttaccccataaccttcttcataaagtatgcccaaatagtatttagcttcggcattatcttgtgcagcagctttgctaaaccactcaaaggctttctgatagtttttaactccaccatcaccatttgcataatatgcacctaaattattttgtgctttcacttctccttgttcagcagctttactataccattcgaatgcttttttataattttgctctaccccttgtccaagagcatacattgctcccaaattattctgtgcctctgcatttccttgattagcagctttgctataccattcaaaggcctttttataatcttgaggaacaacctgtccctctacatataattcgccaagttttgcttgagctcctgcatcaccactttctgctaaatgcgtaatatctttaaaatctggttgatggccacaagctaataagttgattgctactaaaataatgccgattttttgaagtttttttcttaaaataaaaaacataataaatattaaattgtttgtgatgagaaatatattgaatgaattttagcataaatcctcaagcacaattgacccaaaacccaaacaagccctacctataaaccacttactaatccatcaactttttacggcgatacaatccacaattcccagaaaatagcgctgccaacaaacaagtaataatggcataagtggcaacattcattccaaatagctcaacagctaaaataatagatgttaacggtgccttactcgcgcctgaaaaaagactgaccaaccctaagcctgcaagcaatgaaataggcaggtttaaaaccgcccctaaagcattacctaatgtcgcacccacataaaacagtggtgtaatttcaccacctttaaaacccgaacctaaagtaatggcagtaaaaatggtcttgttaaaaaagtcgtaaaactcaatcggcacataaaaagatgaaatgattttatctgtacccaagccattgtattgctgatgcgcagtgaacaaagtgagtagcataatgacgataccacccgccatcgttcttaaaggcaaataccgaacatatttataaaagacatcactcgcaaaatgaatagctgcaataaagaaacgcgcaactaaaccaaagatcaaccctgccgcaatcaggctcatgagcgttccaaaatgaatggctggaaactcgctaattacataaaaaacatgcggatgaacaatttcgaatagctcagggatggccgaagcaatcagcgccgacacaaaacatggaaaaatggctgagtatcttaaattacctaaggcagtaatttctaaaccatagattgcacctgccagaggcaagccaaatacccccgcaaatcccgcgccaatactggcgattaagcaaatttttcgattatcttccgagatttttaaaatatggctcaggtggtcaattaaagcacccgaaagttgaactgctggcgcctcacgccctgccgaaccaccaaacaactgcgttaaaattgaggtgataaaaatgatggggctcattcgttttggaataaacgacttgggttggtgaatttcatctatgagtaaatgagttccgcgttcaatgggcgaaccatattttttaatgagataaccaataccaaaacccacaaaaggcaagaaataaataagccagtgatgcaggcttctcactttatttgaaatatcaaaagccacaaaaattaaggtcgatgccaaccctgcaacgactccaatcacaatcgaaatgacgagccagtagacactgtattttagaatttgatcatattcagatgaaggtagaattttcattcgctttcttcaattcgcctttgagtgagtgccaaattctcaaatttttttatgctgccagctcattaagtgagaaatgcttaaactgggctaaaaattaaagcccgcatatgcgagctttcaatacagtgattaatttttagtatcaccaaactgtgacaaatatctcataattactgtgttttttcaagacgaaattcgttaacgacaacgttgaaaaatttcctcactgatttgatagataaaggttatgttgagtcttagcgtactaagactcaatcaatttaaaacagttcaaagcttagtgaatactcgcaatcacggtttctgcatggcaggtcgtgcctttctcggcaccaatctgaataacaccactgcggtgtgccagtacttgaacttccattttcatggcttccataatggcaaccacttgcccctcggtgacctgctcaccattttcaactttccaagcactaatcacaccattgatgggtgccagtaaatgctcggcactgacttctggctcggctatttgggcttgaacggcggttgctggcccttgtgcaaacatgcccgcaggtaaacctagacggtgtaacttgccatcaatttcaatgtagctgagcagcattggttgttgatggtttggaatgccgcgtttggttggctttaactcttgtttaaagtcattttcgatccagcgtgtatgtacattaaattcatcggtaaagccaggttcattgagtaccgcacggtggaagtctaaaaccgacgccacgccttcaattttgaattgtttcaaagcacgtttcgcacgggcaattgcaacttcgcgggttggaccactgacaatcagttttgccatgagtgagtcaaaatggctagacactaatgacccagtgcgaacacctgtgtccacgcgtacaccgtgaccaaacggcgcttcaaacaaactcaacacaccaaaggccggaataaacccacgcgctgggtcttcggcattaatgcgaaactcaatggcatgaccttgagctttcggtgtttctttaatagaaagcacttcaccttgagccacgcgaatttgttcaacgaccaaatcgacttttgaagtttcttcagtcactgggtgttcaacttgcaaacgtgtgtttacttccaagaatgaaagcttgccatcacgactcagtaaatattcaactgttcccgcacccacatagtttgcagcctgacaaatattttttgccgagcttaaaatttgttggtaaatctcatcgctaataaatggcgcgggcgcttcttcgactaacttttggttgcggcgttgcaacgagcaatcgcgtgtacccagtaccacaatattgccatgttggtcggctattacttgcgcttctacatggcgcggtttatctaaatattgctcgacaaaacattcaccacggccaaaggcagcttttgcttcacgtactgccgactcataaagctctttgacttcttcgagtttccacgcgacttttaagccgcggccaccgccaccaaacgccgctttaatggcaattggtaaaccatattgtttagcaaactctaaagcttcctctgcattattaagtgggtcttgcgtaccctgaaccaaaggcgcaccgactgaagcagcaattttacgtgcttcaattttatcacctagtttttcaatagcgcttggagatggtcctacccactttaaacctgcatcaatcacagcttgggcaaattcggcacgttcagataaaaagccataacccggatgcaccatcgtcgcttttgatttttttgcaacttcgataatggctggaatatttaaataggtttcactggcagtcgcaccagccaagccccatgcttcatctgcaagttcgacatgcatgctattaatatcgtcatctgcatataacgcgaccgatgcaattcccatatcacgacaagcatggataatacgaacggcaatttcaccacggttagcaatcaataatttttctgtattcatcattcattctcaaaatctgtaaattcggcaatttttttaaatttgatgcggcaacctgccggaatctgtgccaccaaatcccaatggtgtttagcaactgaagcaatgaccggatatccgcccgttaaaggatgatcattcataaacaaaaccggctgcccactcggtggaatttgcaaagcgccaatacacgtgccttcactttccagttcatgggtgattttgcgagttaaaggctgttcacctgaaagtcttagcccgactcggttgctttcattggttaccagccattcttgctgacagagcagctcaatactgtcttgttcaaaccagtctgtgcgcggtcccatcacaatatctagctcaacgacttcgccagcttttggcaaatcacttttacccacttcatttacactaatgttggctgcctttacttgcccttggtaaatgctatctccaagctttaaaggctctggccctaacactgctaagctatcaaacgaagcactattgagcactggttcaacgtctataccaccgcgaactgccagatagtttcttaagcctgcggttggtggctgaatttgaaattcatcgccttcatccagatcaatcggttgatagcttgcaaagtctgcggtttgaccatcggcaaatttcacacgaatgtttgagattgcacctgccaccgcaataacgcctgcatgctgcattttggcttttaggccgccatttaaaacttcaatgacaggtgtatcggttgggttacccacaatacggttggcactatgcatggcagataaatccattgcaccagccacgccaacaccaatattggtctggtttaaacgcccttcgtcttgaataagcatttgtaaacttggcgcagtaattgtaaatagtggcaccgattgtttcggctcagccttacgtgtgatttgctgcggtacagtcaccgtagttggacgatgcgtgacatcttcaaaatgtacagtcatgcccggtaacagcaatgcaggatttttacgctctaaatcccacattttttctgttgttgtaccaatcagctgccaaccacccggactgtcttttgggtaaataccagagtattttccagccaaccccaaagagcctgacggtatttttttacggggaaccgttaagcgtggaatatcggtaaaaggcttatcgggactgctcatatacgcaaagcccggcgcaaaaccaataaaagccacattccacacgctttggtgatgttttctaatcacatcagcaacagtcagcccttgtaactcggcaacttgcgcaaggtcttcgccgttatagcaaatcggcacaatcacttcttggccgctacgctcaaatccagaatcaattttgaggctctgaattgaagcaactagcgttttaaaattggtttcgatctcattaaaaaaaccaaaattgtttttgcagcggggactaagtctttaattccattcaattgcgtattttgcaatttattgtacaacgccaatgtttcttctaagctcgcaagctcaatcagaaaacaatcggcgtttaccgataaaaaacgcatttgcttatcctttttaattcttccttagctatttagcccatccaagcgcggtcaggaatatcggtaataaacatgtaacccggtgcatgactaatggcaaaaggaattttcgagttcatgactgctgcttgcggtgttacgccacatgcccaaaacactggaatttcacccgcttcaatacgggaagcatcaccaaagtcaggcttgtttacatccgaaattcctaagctttcagggtgaccaatatgtacaggcgcgccatgtacactcggcatgcgtgctgtaatttttaccgcttcactaatttgatgagatggaattggtcgcatggaaaccaccatatttcctgaaatacgccctgccggttcgcactctatattgctcaaatacatcggcacattggtatcgtcatgaatatggcgaacttcaatacccgcttcttgcaaagctgtttcaaatgaaaaactgcaaccaatcaagaaagtcaccaaatcaggatgagcattataaatttctctcgcatcagtcacttcatcgaccatttcgccatctttccaaatgcgataacgtggaaagtcagttcggatgtctgagtctgcggcaagcttagttgcatagatgccttcttcgagcacatcaagcaccgggcagctttgcgggttacggtgtgcataaagtaaaaagtcatacgcccactcttttggcactgaaatcatgttgacctgcgtcatacccgcagccatgcccgccgttggtttatcgaaacctgcacggatttttaaacgtgcatctaatgcggcttcaagctgagctgggtcgactttaatatccttatacattgcgctcttccttatgctttatttacaaatgggcggatttcaatattattttttacaagctcggctttaatggcagccgacatttctaatgcaccgtcggtgtcaccatgtaggcaaatcgtgtcagcctgaattggggtaaatacgccatcaattgactcgaccccaccatttttaagcatagacaccacacggctcgcaacaaatgccgagtcgtgtaaaaccgcaccttctagacgacgggaaactaatgaaccatcactgttataggcacggtctgcaaatgcttcggacacaacttttaaaccagcagctcgtgcttgctctaccaagttagaccccgccaaagcaactaaaaccagttcagggttatacattttaatggcatcaattacggctgctgcctgagcttggtcatgggcaatggtgttgtagagtgcaccgtgtggtttaacgtactgcacttttgagccagctactttcgctaaaccatcgagtgcagaaatttggtaaagcacgtcggcaatgagttcgtcacgtgacaaatccatattacgacggccaaatccaacaaggtctggataagacacgtgagcgccaatggtcacgccaagttcaaccgctttacgaactgtttttaaaatgccgagcgggtcaccagcatgaaaaccacaagcaatgttcgcactggtcacaacaggtaaaatctggtcatcattacccattttccatgagccaaagctttcgcccaaatcactatttaaatctacaaacatggcattattcctttatcacttaacaaagtctggcttaaagcttggtcaaatagttaaacactgtcgtaaatgacatatagcccatccaccacgttaacagacatgttaatccacctaaaataagcaaccactttggatagttataattacccattaaatctttacggcatgcagccacatacacaaaaattgtaaggccaattggcaacaccaaaccgttaaaaccacctacgaaaatgagtagacctgccggagttgcacccaataacacatagagcaataacgctaatgcgataaaggtaatggtcgtatagttggtctgttttggagttaagttctttttaaacgcggtaaagaatgatactgaagtatatgctgcgccaatggtgctactaatgccggctgcccagaaaattaaaccaaataatttaaaaccaaatgtacccgctgcatattggaatgcttgagctgccggattggcgtcatggctggctaaatcaatggttgcaccgctcaccactacacctaaaaaagccaagaacaacacatagcgcatgatgccgactacaacaatgcccttggtcgcagctttggcaacttcattaatattttcaggtccaacagcacctttatcgagtaaacggtgtgctccggcgtaacagatataaccaccaactgtaccgccaacaatggtggtaataatggcaaagtcgatctgatctggagcaaaggtttgctgaactgcttgcccaacaggaggcattacaatgacggccacaataataatcagcaagattttaagcaatcccaacacgatcatgcttttatccatggcaagcgttgcttttttggaagcaaaaatcaaaatggctaaggcaccacttaaaataccgccccactttgtatctaggccaaaaagtgcatttaaacctaaagctgcacctgcaatattaccgacactaaagaaaaacccacccaatatcaccagaaacgccagtaagtaaccactacccggtaaggctttattggcaatgtctgatgcacgcatctgggtaagtgtcaccactcgccagatattttgttggacgacataatcaatcaaaatagaaattaaaattgcaaagccaaatgcagcacctaacttaactgtaaatacagcagtttgggttaaaaatcctggccccattgcagaggtcgccatcataaaaattgaggcaacaatggcccattggcgatctgataaaaaagaagatttcagtaaagacatattaatgcgttcctcatccatttgagcttaacaacgctattttcaaattgaatcaagaacatcatttttgtcccaaacgatattctttaatccttttaaatgacaaagattccctgttccccaatcaacacaatcggtgatcaaatcttgtgtttaaaataaaaacatagctaatccctacgaacaataagactttttacagaaatttaaaattttaaatttttgatttttataaacttatcttcaaaagtaagagtgggataaattttacttattgaagtacataagctgcttttatcgttttacctacaaaacagctttttttaataagaaaaaatagggataaaaagcattcaagaaatagcttattttttaatttgttcattgagtcttttcatggcactttctgaaacctgaaccgccacttcagttaatttttctttcaaagcaacgtcattaccatgaatataaatagacgtgaaatgaaaggtttttaaacggatgggcgtatttaatatttccaatcgtccgtcggtaatttcctttaatgccgttaaggtcggcacgaccgcaatacccaaaccttgctctgctagacgcaataacgtcgctaaagaataactggtaatagaaagtggttcatcaatccccttttctttcatttttgcctttaattctttatagggataggtaatttttggataggttaaaatggtatgcgacattaaggttttaaaagacatttgcccaattccacctttaaaagatggcgccgccaagaaactcagttcaaagttacaaagcgactgctcaatacattcaaaagccaaagttggcccaagcaaaaaggccatgtccaagtcgcctgtacgtaccccttcttgcaagttaggggtcagatctaccacaatttcaaccgaaacttttgggaattcctgttgaactttttcgatatattcaaccaaccacgtatacacaatggtttcggaaacgcctaaacgtatggttccggtcaggtgctggttttcggtaagctcggcaactaaatcagtttctaaacgcataaacttttcggcatacttaaataatgtcatacctttatgggtcagtttaaactgccgcaagctccggtctaaaactttaaaacctaattcattttcaagagatgtgattttttgagataccgcaggctgcgtggtttgtaatttagttgctgccttattgaagctatttaaagtcaccacccagtaaaatgcttcaagattctttaaattcacgtttcgtcctgtcttaaaaattcctttacttttatagtatgtaagtttttagctgagttaggctacccatttattcgtttttagttaaatttgatttatttcacttaaaaaataacgttgagcttttgatagaaacttacttaaagctaaatgtattcaatgttttcattcttctaaaatctacaaatataaaatactgtaaattgcatcaaccgcccttaaggacggttgatcgttataaattaaaagtaattgaaggtaatttttataacatcacacgtgattactgtgctgcgttcacaccaacaataaactgactacaatttgaaccttcagaagcattacctaattgcttttcagaaaacttaaattttgatgcaacagaagcataatcttttttaagggtttgacctgtgagctcacctaactctttcacttgttcaggctttaaaattccgtgttcaactgcttgattgaccattacacatgcggtggtcatcgcatcataacgtgcggccgttttagagtaacctatcgcaccgactacaccaccaataattaaaccaaccactacagccaaagttacatgcattttattcattttaaatacctaaaaaaacaaactaaaaaggagcactttaagagtttgtgctcaagtagaattaagatagctgcttttatttgatataaaaagttagattctttcagttttattgatagttgagttgtcgtaaagacattaccatgctctttgtaagtttgagatgcttgttatttctactcaacatacaaaacataagattattaatttttagtattccaagaaattcattttgaatttaaatttattaacaatacctacaaattttttgctcactacgtagatatatggtttatcagtatctctaacaatataattagacaaatagattctttaagagctcaaaaatcaccctattaatcatcttattttaaagtagtacttcaaatatataaaagtactacttttaattttggaataccctttataccttaaccataaaaaaattctaaaaaatagtctacatccaatactacattttcttttataagggttttctttagttcttctaagaaacctgtcttatatcctccattttcacctctagggttagagtcatataagtcaataattaaattttgtataacattaatttgcgaaaaaaaatcaaataaatttttagcaatgatatgtaattcatcgcctgaaatacatgctcctatctcgccactattatgattaatgtatacgacatttacatcatgctgtgttaagaatactgtagtactttccccatcaaatatatcttcaaacatatattgaatattttctaacgaatcttttcctaaaaaatcatttatatttcctcctagatcaatattaaaatcattttcaggaatacaacttaaatagcttttaaatagatcatcattaacagaattatcctgattaataaggaatctttcaccataaattatttcattacattcatcaattttctttaataaatcattaaaattcatgatacctatcctaatattaaatactacaacctttattaaactgattaatcattgcttgtctatcaatcaatcttcctctggaaacattagtcgtacttcctcgatgaccttgtttcgaatgaaaatgctcattatatgcatttggcataggactactatttggatgtttagggttttccaagaaaacaatatttcgcggatctcctttccaactttcgcctaatgctccattatttttaacactgttaatgtgatgaccagtatagccaagatttgacataacagatgagagatgacctttaccactaccacttggcgttctaagaatcgtatccagttcagctttactccaatccctagtacctgttcctgttgtttgtattagttgcttctcaagagaccaagctctatcaatagcatcttgtcgacttccagcttgaggtgttaccttatctggcttatatctaactagactacatggtgctaatccatatggatcaacccattgtacggggttcgcagtataagcatagacattaaaaccacccaataatccaatcggatctttggaaataaaacgtccaacataaggcgaataataacgataacggttataatgaagtcctgtttcctcatcaaaatattgaccttggaaacggatattattgctaataatttctgacttttcaaagaaatctgagttagtctgctctagcttacattcaccccaagctttatattcagccttccagataatggcacctgtttggtcactcatttcctgtggcgtgcctaaatggtcgcagtgatagaaccatacatcatcaaaaccttgactttgttttactgtattccaaagagggtctttataaatactatatgttttatctgaccagtcttgggtttgatgtagctcaatggggtgatgatacgccgcttgtaacaaaggcacgaaactatctttttcgtagaaatagtgttttgttaaatcagcactcgattcatacgctaaagtatcaccatcccaaccataactaatgttctgctcttgacctgtatggtgatgcttacttcttttttgaatacgtcggcctaaagcatcatagcgatattctgccgtatattgattgtttcggctacgaacaagacgtccaaatacatcccactcaagatttaaatcaccttgtgatgacttttgtcgaatcagttgcccaaaagcatcatattgatattgttggtcaagatattcctgtacgatgttattgactaagcgattatagccataacctttttcatcagaaatatgctgtgaagattgctctttggtactgttatatcgctctaaaatattacttgccgggtcaaaattaaaagtctctttcccaagtttactagttgcctctaataaacgcccaacaggatcatatttataatgaatagccccacgacgagtatccttaatgagcgttaactcaccagttttatcgtagtgatataagcgttcaatcaattggttggtatgctggatagcattattttgagtttgggcctgatagcctttgtcatgcccactcaacattaattgctgagttaagcgcccgacttcatcataactttgttgttggctaagtccatttgcatagtgtcgcaacgtctctctatgtaaatcgtcacgctcaaaactaacaacatcttcaccatttaatgccatgccatagacatgtccacttccataagacagccaatctattttctgtccgtctggtcggatggttgtagttcgattatttaattcatcatagacatgtttccacacagcagttttctgtgtcacaacatcttgatgatgctctttaattaaattacctgctgcatcataaaaccactgcaagttagtttcggcatttttagcctgaactagattacctaagccatcataagaaaattcttctgtttgtttttcttcaagctcttgtccttgatagccatatcctgcagtacgttgttctaaacgtcccatactgtcaaaaataaattgctgaatacggtctttaggtgccgcacggtctttgaaatcttgaccataagtagaagcaacttcaatacttgtggttaaacgaccattatattcatcgtatgcataaacagtttctttgccatcaaaatcaatttcttttactaatcgacccgcagcatcatagacaaattcataacttgcgccattttcattaattaaacgttttaagcgacttagacggtcccattgatattttaaagtttgatttaatgggtcagtacgcttggtaattaaaccagctgcgtcgtattcataacgtgtctgctgaccttttgggtcaatatgaactaataaacgaccttctgcatcatgaatgaaatgctcttcagcgccatcagcgtgtttaattttttcaagctgaccaaaagcattcaacggtaacccttttgctataggctgtcttagttcagtagttaattccgtatagaaatattcaactttttgctttaaagcattttcaataaatttgacgcgcccgcggtcatcatagtgccacttggtctctttacctgaacaatctgtataactgattaaattccctcgatcatcatatttaagtgtcttcttacctcctttcgcatcagtaatggaagttaccaaccccattgcattataggcatagactgtttcgcgcttcagcggatcaatttctttaattatatttcctgaagcatcgtattctttaaaccaacgcccctgttcagcgtcaacaaaaccgatcagattatctttttcatcgtattcataatagaaagtcgaaccatcggcctggaccatacttaagacattgccacgttcatcataggtatatgatgtttctgttccatctgtggcaatatgcgatgttatattttttgcttgatctctaaagaaccattcttgcaaattatctggataaataattcgataggtataaccagtaataccataataatattcagtcacgttaccatcgatatccatgactgaagttacgcgaacattttcatcccaatctaatttagtagcggaactataatcatcagcccattcctcaatcgcttttgaactaggtaaaactccatcccactttaggttcatcccacgatgagtaagatcggtataacgagttaataaatgagcttggtattgatattcataagaagcagcaaactcattagttgccttaattaaatcatcttgttcgttatattgatatgctgatagttgtctaattagttgaccctcttcaaccaaccaagctgcaacaactttctgcgcatcattaatctgtaatgctacatgtgccaatatttgttgttgctgtttaaatataatatctgataaatagctatcactattttctaattcatgatcataacgtagcccaatactaaatccattttggcgttctatggaggctaaacgaaactcattcttatatttttgatagaagcgagtttctgaaacaccatatgaaattgctctaatttcaggtgagataactgtataagtgaaagtctctacttcatcataataactctgcccaactttcagctctggtaagcgaactggacggccatcactgccaatatactcccaaccgtcttgctcaattggctcttttggatgatgcacattgtaacttgagcaacgaactattttagttgtgaaaggtgtaatccatcgcgccccgaaaatagattgatcatactgatataagtttgatacatatgttctagaaaattgctctatcaataatggatgaatttgtgcatcgatatgatttaaaaattcagtacccaacgcgaatgtaatagagtgtgtcgttccacctttacaatttttacaggcattcgcattatgagtcgctgcatgctcatcattagatttttctaatttattatttttcttgtcatgcttaacttgtgttgtttgagttggcttaacttgtgctgatttctttttcctaaatttagatgcactcattctcaatacatcaaatagccatcctattgtttgtggctgtgctgtattacccaaacctttaattttagtattggcagtgataccaattttattaatcgttgcacctacatttaatatcggctgctttagatgtgctggtactaaggaactagcaactttagcattggagtttgctccagtttttataagagcttttccccagttttcggtcatataaactagattttttccagctcttgttaagtcaccactttttattcctttaataacgccagctgcttgctgttgagcgcggctcgcatttgacccagcgtttgtaaatatttgacccttagttacaactcgaacaattccaccattaatttgtgttgtggcattttggaccgttgcaccacaagtagctaaaattgaatttagtttgtttaaccctgttttgcagaatttttctatatcccctgcaacttgatcatttaaatgattagagatcacaacaataactgcttcacctaaagcagctttacccacacgtttaacttcttgacgaactaaaaataaagctggacgagcagaagtacgaattgctgttgttccaggaataggtgcaaccccaataaggtcaatacccattgtggtccaatccataatatcggcattttgaaaacctttatcatagatatagcaaatgtcggaaaccacatcgatggcagccatcacatttccaataattggaactgttcccattacacttgccactaagtctaatgtcacaatttgatgcgtatggctctgtaaccaactatctattttttgttttgaatggctaacatctttaatcgcaacttctgttaacggcttaacaacttctgtttttccagacattttctttctctatgaattctttttaaaagggctttgcaaatattgatgaagcgtattattgaccaaactattgccatcaatagagcctgatttattgaaatcattcattttttgaatagatgtaagttcaatgttgttccctattttttgacctgcttctgaaattggtaaaaagctcttcacttgatcagttactaatccctgcgcctgagtttttaacattggcattaaagcctttgctccttcagattttatgctttgtgcagtttgaatatttttcataatattcgtaggattggttaattgtttagataattcaccaagtttggactgggctgttttactcatttgtgcaattaatgaatctgattgctcactatccgcatcattcttatttggccactcaactggacgtttaaagtcacttgcagtatcccaaggatcacggtgatctgattcgaagaagacttttactgcacctgttgctaagccagaaacttttgcaaatcccttatcatccagcttgccagtaacctcttttccgaagttatcgacaaccctataacttccaccttttacaaactcaccatgtgcatattcatgaaataactcaagtacaccttgtacacgttttggtggcggtggcaaactagattgaacacttgccgatgcgccgccttggaacacatgctgtccagcattgacctgaaatttcccgccagtttttggaaagattcccgaaccatttaaggtaatttgtgaacttgcaccagtaattacaatttctttaggactactaatttcaatacagtcttctgtcgaagaaatggtgatacctttattagcaagtacatctaaagcatctgactgggcttgtatttctaccttaccttgtgcagcaacagcttttagcccgctctgagcagcaaaaaggctcagcctattttgggcatgggcaatcacattcttttgagtacttatattaatgctgtctccagcaatctgattgatttgtgcatcagccgagatgtgaatatcttctgaactacttagagctataccatccggtgaactcaaaagaagtaaagctttttcaaatttagcgatttgctgctgaatttgtgaggcaaaatcttttaactgttcaatcgattctatttcatcggttttctggtttttagcaatgtcactcagtgctttactgttagtttgactaccctcaagttgctttttcgcaacttcggcatcgaggtggtctcctttagcgttatcctgtttatgagtggataccaataaaccttgccccgcacgtaaagctccccattggtcagtacgcagttcaaagccttctccgcggtcttcactttccgctttatctttaggatggctcaatttcccgagatttagctggcttgcaccatgactgctttggagttgggtactaatttgtcccggtgtatcatcaaatctgagttgcccaaacccaccacctgacacttctttagaacggataccactgagctttttagtatcaggaagctttcctttgttatcaaatttggttggttggcgctgtgcctcatgaattcgacccatcacaaacggtcggtcgatatcgccattaaagaagtcaataacgacgatctcaccgatacgcggtaaaaaccgcgcaccataaccttctccagcccacggcgttagaacgtcaatccaagctgaatcggtatcattgttgttggttcctgctccaccatcatggctatggtcatcactacgcgtaaataggaagcggactttaatacgcccccactcatctacatagatttcttcaccttcaggacccaccacttttgcgcgttgtggatgagtgactggactatgaatttgcgggttataagctggtgttgttggaatatgacgacgttgtaaaatcagttgattcgcttggcgttcatcactgttctcggggttttgaattgcccagttactttgcgccaataaaccattgatttgatcatttaaatctttaggtaaattattctgattaaagaagtttttagaaacaatcaaaaagcttttatctgagctttcatgctggtctatttctgggtgttcatttaattcgaaatagtaacccacataggcatcgcggactgttgtttgtgcaataaagcgtttcgcctgtgcctcgtagtaattgtggaggttctggtttaatcgttcaacttgttgatttccagatttagtaaccccatcctcaccctttaagtcaccaatccatgcaggcgaatagttccaagcttgctccaagccaagtgtagcattgtcataatgttcactatgctgatgcttactttgaacacttccaatcccttcttcttgatctaatatttctgcttgccaacgttgtatatgcataacattgggttgaagagaacgctcggcagttaagcgagtcatactgtcatattgttcgaccgcactactacggtggtaacgaatcgttttacggtctaaaggctgatattgactattggcatcaattaacctgagtttctgagcttgaatagatgtatctgtacttggaacaatatgctgagcttcatcaatgagccaactgatattttcactacgaagtaagcgtgtaaggaaattccagtcactttcgttatgttgcatcacaaaaggacgcacatcataagtttgtgttagaccgcttaaatctaaacttaaacttgcagcaaatagcggatttttagtttgccattctttaaataatatttcccatatctcaaccacgcttttattcataaatacacgtgaattacggcgatatttccataatgcggttggatcttctaaggtcagcttatataaagttagacttccatctgattggccctgttgagcatgagtaataatgcctgtaacgcgagttaattcacctcgctccgtcacaatatctacagcagcctgaacaccaataaaagatttaagttgaatcgttgcatttgtcgataggcataaaagttctgcttttaaaccatcattgagtgcatgtacaccatcaattctttgcagaaatacttggtcattcaatatcggagacgtaaattgaacatgaatagcacgtttctgcgggctaatacccaaactatctaaaacttgatgaatactgttcaacatctttataggactaaattatattttgcagtattttataaaatacatacaaatctgtctatttcattagcagtgaattttaagtgtaagagacacttcttatcagtgcataaacaatattttcgaaacttaaatataatgaaaataatgtttaattttatatattaagcttaatttttagcttatattttttttaaaataagataaagaatctattacttaacaagatagaggtaacaaaaaacaatacttgtcaatcttttgttttttatattcttttttcaaaattaattaaaaaatttcttatatctataaatctaggtagaaaaattcttttattgaatatttagtttaaaatatttatatatttcaaaagactaattaatttaattttaggaaaagagacatcaatgttgagtgttctaagttgtctgtaaactttattgacagccatgtttttatagttaattagggtttgataggcgtgtgaataggtatttttagtctcgtaaatagctttagataatagatagttgagtcctgttaaattagtatgtaaataataagtactttaaaactattttataaaaaactgtaaataagtctgaatataagaggacatttaatgaaggactttctcaccaagaaaatgtacgcaactagagctttattttttgctgtaggtgttatggctttgaatgtttcccctattgctatttctactactcatgcagcgacagaacaaaaaatggatatatcgactacactttcattaatttttgcagataaacccatagaagcttctttatttagccctcaatttttagaacaagttcccatcacacaaattcaaaaaatcgttgatgatttaaaagtctctttaggtgctcttaaaaatcttaatgtttcaaatggctctgggactattgatttcgaaaagggagaattacccgtttcaattagcttaaatgagcaaggacaaattagtactctttggtttagcgcgcctcattttaagacaataagcctagacgaaatggttaaaggtctacatgaaaatgcaatcggtaaaacatctcttttagttattgtagataacaagcctgtggttgtagaaaacgataaaacccctatggctgtcggttcgacttttaagttactggttttaaaagcttatgaagatgcgataaaaaaaggcgaattaaaaagagaaactattgtttctttaaaagaaaagaatcgctcattgccaactggagttttacaaaacttgcctgctggtacgcctgtaaatctcgaacttcttgcgcagttaatgatacaaattagcgataatacagcgaccgatagcttgatagaggtattaaagaaacctcgtatagaaacgttgtcacctagaaattctcctctgctgacgacacgagagctatttcaactgattgacccaagtaatgaaaagctcagaaataagtttaaaacaggaacaaagtcggctcgtctagaagcactcgctgaactagacaaactgccgctaccaagtgtgagtagcattggaaaattggctacttggcaagatgctgaatggtatatgtcagcccatgagatttgtcctcttcttgaaagtgttcaagatgctccggctctgaacagttctttaaatccactttttaaaaatttaaattggcaaaagatcggtttcaaaggaggttctgaatacggcgtgattaacttttccgtgattggaaaaactcaaaaaggccataaagtttgtgctgtatttaccgcaaatggaaatgagccacagcctgagtcaaaactagccatattatttacaggcatacttcaagctgttgattttatgaatcattaagagtaaaagcccatcatgattagaaggttttttagcacctccttatgatgggctattttgatttagagttattcaaagaataatcgtaaaagtattttaattaaactgaacaatagatagaaattcgctataaatattaatctatttataaaagatgctaaaaatgaaaaaagttctcttgtttgacctagatcaaactattcttaaccgaaatgaatcacttttaaaatttcttaactggcaagtaagctacttaaacttagtaccccatgagctaaaaaaatcttttattaaccgattcatagagctagacaataacggaagcgtttggaaagatattgtttacagtcaattaattaaagattttaatatcaaaaaatatgatacatctgaattgctgcaatcttacattaatgattttaataaattctctacagcatttgaaaatgctccaaaaactattcaaaatcttcatgctcaaggatacacattaggcttagtatccaatggaaaaacaccttttcaggagaaaaatttttatgctttagaattaacggactatttttcgattatcgtgatttctgaagctataggtttaagaaaaccagatcctgaaatctatttatacacttgcaatcaactagattgtaagccatcagattgtatttttattggagacaatcccaaagcagatatagaaggtgccaaaaaaattggtatgaaaacaatatattttcatccaactcttacccttcatccttctctttcagatgcaagtattcatcattacgatgaacttgaagaaacggttagaaggttaattaatccgcctcatttttaatctaatacgcactatatgaaaaaggctaatttaaataattagctaaattatttatcttgttttatatcgtatgaatatttttgaaaaaacgaagtcttgaatattatagataatacttgcaggaaaaaaatgatggaaatttcattaagattcgcgacccctgccgatctcaaagttataaacgaacgctatgccgagattgattttgtaccatcacatgctggtgaacttattgtactagcttctattgatgagaaaattattggtcaaggtagagttgtgggtattgatgctaacagcggcgagcttggtggaatttatgtttttccgggcaatgaagggttaggaatcgcccgtaaggtagttgatttcttaattaaaaattcagatttttctatgctttactatttaccctttgccgagttagaaggcttttatggctctatgggttttgctgctgtgaaagacatggctcaggttccagaagctgtactaaaaaaacatgagtggtgtaacagtaattacgacaaaccggttttgcttttagaaagaagtaaataaaagaatatttataaaaaaaccgccccagaaggcggtggctgaatttaaaccagcaatatatagaagtatggtggacgaatacttctatattcttttacgaaggagttttattggttttcataaaatcttccgatttaaaatatttaataatcatatctgcatgctcttctttaggaggagcaacagtcacaggaaatgattctttagaaattttaaatccgtgcggaattaattgtgaaattggtggaaatttaggttttccaccatcggtaattcgctcgataaaacttgctaaccagagcaaatactctccttcgttttcaaacttcggcattacacttagatcaactttgactttacattcactaagaggcttcgtgagctgctcatcaaaatcaatataattgaacttaagtttaaactcagtccctttaatggccttacgtatctgactgattaaacaattcagattttgtgtaaggtcattggtgaataagtcgtcttttttaatattcttataaaccttttcagccacggctaaatactttggcatttttaccctcctcaatctcaattgttataaagttttgatcttaaaatgttttatggttctgattatgattaaacaaatgtaaaggagtgaaacaatattatactcaaacgtaagtagttaaagctttatgtaaagactattgaacaatcacctaaaaaaattatggttttgataactcatccgcaattttttttaaaatattattatcttttgaaatatttattttcaattaaaatttaccatttggtaaaattaatacggtctcatttgctgatctcgtcttacaagtcctagaacggatctacgaactcttatttcatcttcagaaaatggtaaatgctcttttagctcatctatagaaagtgaattattttctattaaaaaacagtcttgttcggtcgtccaacgtgaagctattgattcggtttgtttccagtaacgtttcatatgccctagtaaattaatcagtctaaaagcttacgatgagtgcaagctttttatagattgtgtgcagaaagaagagtaggaatagtaccgaaatactcaaaaataaaaaagccaaacacctcaataaagcactgtttggcctttcataaaaactggtttaatccaactctaattgttgtctcaattttaaaatatcgactagtcctttatcccttttctgagataaatcgacatctttataatgtgttaaaagttctttagtttgttcttctagcaactcagtagtttcttcagagtgctgaaaattttgcatatcattccaccattcggtcataggtggtcctaaatggtgaattgcctctttaaaccccttctgattggcaagttccatatttatgtaggggccaaataaagcccatctcagcccaggcccactggtgattgctatatcaacatcttctgccgaacacaccccttctttaaccagtgaaaatgcctctcgccacaaagcagcttgtaaacgatttgctacatgccctttaacttctttttttaaaacaatcggatgcttacccaaactttgataaaactcggaagctgtctttaaaatttgcggatctgttaattttccacccacaatttcaaccaaaggtaatagatgaggtgggttaaatggatgacctaaaaaaatacgctcgggatgagttgcatctttttgaaagtcagaaacttttaagcctgaagaacttgaagcaattaatgttttttcagggcaatatgaagtgatttcttgatataaattttgctttaaatctaacctctccggtgcattttcttgaataaaatcggcatcaatcaccgcatcttttaagttgttgtaaagctctaaatttaggaaaatatcttgtaaatgatgacttgaatctgtttgctgatctaaagcgagcaaatcactaagatttgcctgtattctctttttaaataattcttcgtctattgggtaagggtcatacacctttaccttaaagcctttatataaaaataatgctgtccagcttgcaccaatgacaccgacaccaactacaccgattgttttaattccttccatatcttcctcgtgaccttattacttcaaaacttttcttattcccttgcatgactataaaaatagtcgacttcttaccttttctcagttattcaaagccattttataataagcacgcataaccaaaacttcataccattattgtacttttcttgcattaccttcatttttttaagcaaattttggctactgcttgcagccctataagcactaagggtgtatgattggcaagattttgagcatttaactttaatatgacgaatacattttctgaccacaagcaagttgaagtggtatctacttttgctgaacttgtgaatacacattttcagggaaataagaatgctatttgttggcacagaaatttggtgggcgactttaaagaaattgtggctaaacttgagttaatagaaaatattaccgaaatttctactgaagacctgttaacacttgagctttcagaacaaggtgatttggctcgagacattattttaaaagacatgcagctcttaactgatatgggtgcatcacctctacttaatttacttaagcattatgaacgtgatgaagagctcgattttatttcaacagatgtctattcatttcatgttgatcgttcccctattgaaaccgacacattcttatgtacttatcacggtgcggctagcgacattgtgccgaatgatcaggttgaacaaaaagttttaattcctgaaattagagaaaagctcaaagctttacatgacggcccagaagccgaatttgaaagctttttaacagagtatttttttgatttacattatcagcctaaacccgaagcacaacctataaatttaggtattggacatatttggcgtttagcagtagatcatccaactcaaaaggttttaccgtgtgtgcatcgggcaccagttgaaaatgacggtgaatatcggttgctattgatttgttaggtatttcaaaatcttatatagaaccagtcaaaaaccaaaaattacttttagaatcgtgaagaatttctggtcgttaaaccacagtaaaaagataaatctgaacatttaccaaaaataaaataataaaaaattatgatttaaagtcattgaccctcacgtaacgtaagcccctagcataaaacacgcctaaggaagaaggagctaaaaagatgctgttaaaagttggtgaattggctaagcaaacaggacttactgtccgtgctcttcatcactatgacgatatcggtttacttcagccttcggcccgttccgatgctggttatcgactatacacccctaaagacatcactcgtttgcatcaaattcaagcattacgagggctgggtatgtcgctagccgaaatctatacggttcttgaagatcccaatctagcacttttaccgattattgatcggcagattcaagcaattgatcaaagactggcagagcagaagaaattgcgaaatcagcttggacaattgaaatctcagctcatcaatggtgaagaacttgatttggaggattggctaaatatgctggagcttatagcaatgtacgagaaatactttacgcaagaagaacttgaaaagcttacatttttacaatcaggtactaaaacccaccaagaatggcaagagttaactcaagctgtaaatacggtatttaatgctggagaatcatctagcagtgaaaccgctcaaaagctcgcccataagtggatgaaaacacttgagcagaatacgcgcaccaatccagaatggcttgttaaattaaataacatcaattctgcagaacctgaatttcaggaaaaattaggattaatgccagaagttgttgagtttttacttaaggccttttcagagagtaagctgagtatttttgctcgttatttatctgataatgagtttgcttttttaaaggaaaattatgttcgcgaaatgaaaaaatggcctcaactattagtcgatattgagaaattgattgacgctgaggttaaaccgaatagtgaaggagcaaagcgtttggcacagcaatggctctctatgctacaaggttatactggcgaaaatccaagcactcaagaaaagattcgtacagcaatgcaaaatgaaccaagccttgctgacggtacttggcttaaaccggttaccctacactttctagaaaaagcagtagcagcattcaagcatactacttagttctatctatcaatttaaatggctctttttttcaggaagagccatttacccataaatatgattaaagtaaagaaacagtttcaagatttttagttataaaactgaatattgcagactgtgattcaatactgactaaatgactttaaaaaacttaataattctgtccattctcgcaattgcataagtaatgtattcaaaataatatttagacaaatagattataactttacatattgtttggcttatagatcaatactaagaagactgtgaagttaaatttaaaatgaatcattttggcagttaaagccatccatatttaattagagaaacatttgatatgaaaaaatatttattcttacttttaatgagtttttactcaattcattcatttgcttcggacaaactacatggcagtgtttggaaaactattgatgatgccaccaatcaaccgagagcgctggtaagatttagccaagacaaaaacggatttctatccgcaaatattgaaaaaatccttgttccaagcgaagccagtaaatgtacgatgtgtgaagggacttataaaaataaatctttaattggtttaaccattgtcaaaaatttaaaaaacgtaggtcaaaataaatatgacaaaggatctattctcgacccacagtcagacaaaacttatcgctttagtgtaaccgtatcaccagatggggaaaaacttaccgctcgtggctacattggtatttctgcaattggccgaaaccaaacatggtatcgagttaaataatccatgagtagcttgtgaccaactctctgaagctactcatagatcataattacggtctatatatgtactatgtaaattctatatttagaccgtattatgaccgatacttggcctgaatcatcagcatgataatgacgaatagcgaaggtatggcagcaatcacaaataaatgggtaatgaccagaaattgagagagataaccgccaaataacggcccaatgacagaacccaaacgagcaattccaatactccagcccacccctgtagtacgaagtgaaactgggtaataactggccgacaaagcattaatggcaggttgcccaccaacaatggcaaagccagcaataaaaatgataataaacaataaaacgatatgactaacagaatagccaattaaagcaacactaatcactgcaaccagaaaaacaggaattaatactttataaaatcctgtcttatcaattttaaggcccatcaccacactaccaatcgtaccgcctaattgtagagtggagccgatcaacaatgcctgatttaatgaaagcccggactctttggccaaagtcggtagccaatttgccagaaaatataaactgatcatatttaaaatactgatgatccagatggaataggtaaaaaacgcacgctgatttttaaataactcaagcggtgactttttaacctgaacctcagtattattgatgatttttatctctgcattgaatgttaatgctggataaaacttctttaaccaaaacaaaattttggagctatttttgctatgttcacttaaaaaatataaagattctggtaacttaaagaatgtgataatgaaaataattaaagggataataccgccgaaataaaaaatcgcctgccatcctccccaaggaactagtaaggctgatattccgccccccaacattgcccctaccgtatagccacaagaaatgaccatcatggtaaaaatacgagattgatatggaacaatttcggagctataagccatcacatttggcatgataccgcctaaaaaaattcctgtaacaaagcggattacggtcaattgctcaatattgcctacatgtggtgtcaacagcatcaatatggagaatataaaggtcgagatcagtagtatcggacggcgaccaaaacgatcagaaagtgaacttaataaaaatgatccaacaaacaaaccaaacaagcttgcactaaacacaactcccagcatcgatttttgaacaccccattcttctataatcagtggggctgcgtaagccatggactgaatgtcatacccatccataatcattagtaataggcaggtaaccaaaataaatttttgataaggtccaactttctgctgattgatcaaatcacttaatacaatttctttcatggtattcctttctccatgactcgctttaaattaattccattttaattatgatatacgtaatccatttacgattagcgtaaaataaaatagcaatattatcgccacaaagtcaaaaatattaatttttataatataaacagtatgttatatctaattatttgatctaacctgagtaatgagctcacatcattgcagggtgtatatggtctgctcatctaataaaaatcaagcaaaccatacatccttttatttaaataactcatttacctcaaacaagttggcttaaaaaaatactccaccaccacatccctttcatccaaactctttgtactcaaaaacccgaacatcaagccatctattaagtttaaaaccatgttggcatcgggttttaacgcacgtatttctaagctaaaaatcagttcaaaaatttcacgagtcagccattttctatactctattgccatacggtaagcctgctggtaagccactttaatttcaaaaaaggctttaagtagcaagtgatacagactgttagagttaacatgtaaaactactatttccttgagcttatcggttggcgtgcaataacggcttgaatagataatcgcaagcacttcttctttaagtagacttttttggaaagctatacacatttcaataagtcgttcttttgagtgaaaatagttatacaaggtggctttcggtatttctgattctttgacaatcaggtctacgcctgttgtatgaaatccatgtgtggtaaacaaacgaatagcggtacgaataatgtgtaattttttagaagaggtttctaaatttggcatagttttaccgttataaattcttgttgtatgtaaagagatagaaatgccgtcactcttaaaatgagtgctaaatacaggcatgcaaaagccgcacaagtggtgtgctcgcctatctcgagttttgttgttgatatgattttttagtcgtgacgattcttaaggtgtagaaaacctagagccgttttaaagactgtttcggcggtataaataaagagaatttggcaaaagccaataaataagaaatagtacgcatgtgcgaactcctttgggtaagaaagaagtttcgccacatcactgctaaatgattatggtggcgaaacgaaaaggggttagcagactgatttacccaaaaatcagcacatccgaagatgtccccctcccgttccgccgcagagggggcacgtagggatgcccacaaaaaagagagactttttcgtgtgctttgggtaaatacggcctgctaaaaccgactggcaatgtggccagcaggcaaaggatagtgctctgccctattacagtcaagcacacaaaatgacatttgttttaaattagatcattaaaaactaaggataaataattaaaaattattgttaatttgggatttataaagtctcggtttaaaggcctttaaatctctcagttgactgtataaaaaggcataacaaaatcagtaaaacttcgcttcaccagcaggacgagttttaaaccttctatgaaaccacatgtattgtgttggggcgatccgaatctggttttcaataattttattgacgcgttcagcatcattcacttcgcattcgctaggaaaattttcaagtttaggttctaccagtacattgtattgaggatctcgaatatccccgcttctgtaaaaatactcaaaatactctgtacacgacaaatttcacagaacccttatcctatcagggttctgccttcttaaaattgccaaaatttccttaaactcttcttttttcccaaaaccaattaaacgctgaatcgccatttgaacatagtctaaaccatagcgaaataaactcattgagagtcgtccatgcttctttatttttatcgcttttttttgatcatgttgccattcacccgttaagtaacaccaacagaagcttatagctaacaccgcaatcaattttttcactcgtctagggtctgtcaagcgcgtattttcaagattaaacccgcgtcctttgagacaactgaataaggtttcaatttcccagcgtaatgcataatcctgaatagcattggcattaaactgaggagaaacgacgagtaaaagctctccattttctaactgtagtgcacttatatatagtttcacccgaccaaccaaaatccgtcgtttacgacattcaatttgaccaactttaagatggcgaaataaatcactaattttatgattctttcctaaatgattggtgacaatgaagtttttttaacacgaatgcagaagttgatgtcttgttcaattaaccatgtaaaccactgctcaccgataaactctctgtctgcgaacacattcacaatacggtctttaccaaaaatggctataaagcgttgaatcaaagcaatacgctctttcgtatctgaatttccacgtttattaagcaatgtccaaaggataggtatcgctattccacgataaacgattgcgagcatcaggatattaatatttcgttttccccatttccaattggttctatctaaagtcagttgcacttggtcgaatgaaaacatattgaaaatcaactgagaaatttgacgataatcaaaatactgacctgcaaagaagcgctgcatacgtcgataaaatgattgtggtaagcacttgatgggcaaggctttagatgcagaagaaagattacatgtttgctttaaaataatcacaagcatgatgagcgcaaagcactttaaatgtgacttgttccattttagatatttgtttaagataagatataactcattgagatgtgtcatagtattcgtcgttagaaaacaattattatgacattatttcaatgagttatctatttttatcgtgtacagaggtaaaaatataaaggtattgcaacagcgtttgaaatatccatgagtcttcgatgtgccgtgactgttgctgcctgtattccaaagaatgaagccataacaccttgctttaaaccaaagtcctgatcagggctataccagattgcatgaccatttttgagtttttcaattaagctacgcatattgtcttttgcaatctggtttttataaaccctagcgcgactacgatgaatgaggaaatccatgaaaggattattttgaggtctatacaccacatccatatcaaaaaataacgtacatgcagcacctccggcatcgagtaatgtgctatgcgtgcctaacagcagaatgccccgatcccgattgtcatttagatgttccaagccttctatatgaactctttttttaaaccatgcaggacaataccaagcatttaaggcttcaaatataccaatcatcgtatcggtaaaaaccgacttagccttggcttcaatttgctcaggtgttttttccggaaaacacgcacctaaatttcttaaagtcgttttccttctagaacccaatagtgtccaagcaatttttgaaaacagttttgctaagcgccactggattgcccaaggcaagtacgcaagaaacattagaataaaagctgtgaaccagataccccaatattttaatgatagaaaggaaaattgaaattgccctgattgatactgcgcttcaggtttcgtcatattgtaaatatctagaggtatagaaattcatcctaacacactcgcactctacatacgtttgtaaagtgtgtcttaatattaggctcaatctagcaaactactgctaaacagtactggtgagtgctccgatttattctttatcggtcttgatgggcaattgcttgataaactcatttaaagacattggacagccccataaatagccctgaaactcggtacaaccattacttttaaaagcactaaactgttcagccgtttctattccttctaccaacacgcgaaggtttaaatctaggccaattttaattatacccgtcactaatttattgctgcgtttatcatctaaagctgcctggacaaagctgcgatcaattttaatttgtttaattggcattttttgtaaatagcttaaggatgaataccctgtaccaaagtcatcaagtgaaagctgaataccatgcttagacaagaaatgcattttttcgatcatgctcgcacaattatttaaagcaatattttcagtaatttctaatatgagccgagagggattgaagtcataccgctgaaccagaccaatcacagtgtgctcaaagttagattgcataaaatgatcagcactaatattgattgaaagcgtaagatctttagtctcttcttttttactccagtcctgtaaaactttgcaggcttgggccaatacccactctccgatctctggcattaacccaaaagttgccgctgccggaataaactcttttgttggaatatatcctaaaaccggatgatgccatcttaacaaggcttccgcaccaatcagtttttctgacgaattaacttggggctgataaaaaagctcaaattgttgtttagtgagtgccaaacgtagattgtgctccatactgctttctatttgtatttctaattgcatggtataaattgaaatacaaatcataagagtagcgacacaagtggctatccacccaccatgatcacgaatatcttctgataaaggtatggcactatcgagagtaaaagagctaccactaaaaaatataaagcagccaatcgacagtaaaattaaaacaatttgtaagaagcttggctctctacggtaattcaaatatcccaatatcgctccggcaggtaaaaacaaatgggccactcgagggcgatcaggcgtagcaacatcgaaaaataagcaaaaaacgactggaaacaccagcaaaaccgcttgtgataaaagtatccctgccgaaatacggtttatataaataagaaaaaagctaaatatggaaattagtgtgaaacagatatccatataaacaatcacccacatttgggcaaatgcaaaatatatagtccaaaataagcaaaaaataatacaaataaagatatttgctttggctgcgattgtaagctgttggtcctttagggagcgataatgtttcttgtgttttttaaagtaagacgaagttatcataaataaaccaaccgtaaatatttctttaaaggaccccagccagcttggtcattgatactccatttcaatatttaccaataaaacgtaatcatttctcccattgtgatttgtacttattattttgagatcaagttttaaccaccttaatggtatagcccgattaggtcacttgaacgatactgctttttaaacactctataattttaaagtatcatgacttaacgatacatgcctatgactctcaggtacagcctttaagtgcagaaaaattagtgaattacaatttttgcgttaaatatttttattatttagattcatcaataggaccatttaaaataatgcacatgtgtgcttaattatgctgctaatgaccaagttgttagctttgttgttctgaggttggagctaaaagctaaagaacccatgagatacccatctcatatttttgatcggtctatctcatgtttaccagaaatatttatttttaataatatagaagtctcagcttataccttattacgtttataagaaaaataagaacaacctgcacacgatgccataataattgttatgcctagaacctgaaaactatttaatcgttcatttaaaattagccatccagccaaagcgctcactgcgggtgacgcacttagtaaaatcccaaaaactcgaggatgcagttttttcatggcaatcatatctaatataaatggaatagcactcgcgagcatcgccataagtaaacatgtaaaaagaatcttataactatcaaaaatatggataaagtgagatgcacctaaaggtgttgcaaataaagccgctataaacattccggtcgcaacagagctaccaccaccttgtgcaacttttgagccataaatcacatacagcccccaacccactgcagctaataaagcatacgtcatgccaataaaactaaagttattatttgcattgcccataggtaaaagaagcaaaccaataattgataatcctccccaaaaataatctaatttatttttagacattaaaatagcaaccgtaagtggtcctaacacttcaatggaaatagcgatccccacagacatgtaagaaaatgctttatagaccaaagtattcattaaagtgaggattgatccataaataattagatttttccaattggtctgtttattccactgtcgccatggtttaaagactatccataagaaacaggccgataaggcaagtcgagttaaggtgactccttcagcagtaagaatcggaaaaaggacttttgctattgctgcgccgatctgtacagaaactaaagataaaaatgcggctgcaaatgccatgccttgcttggagtttgtctcaatcatcatatttaccgctctgggaatgattgaaattttaattctctataatcaatatatttcttctatttttcacggtaaaacgattaaataactctatatttaacatttaatgagagatttactcatgtcagagatttctttagataattttgattatgcgatcttaagaatactgcaaaaagacaataaaacttcccatcgagaaatttctgaaaaaatcggtctatccgctgcatctgtacaaaggcgtataactcggatggaagaaaaggaaattattttaaaaaattgcgctatcttaaatcccctcaaatttggtgaaaaaattacttccattattgaggtccgccttagcgaagatcgttcagtagttatggacagagcgaagctatactttgcttctgttgaagaaattcaacagtgctacttcgtgaatggaggagtctcatttataattatcatgctgagcaataacttatctcattttgaaagtttagttagaaaacatttcgctgataatgaggatgtaaaaacttatagaacactcattgttttagatcgcgtaaaagtaaactttgagttgaatatttaaatttttcaatccttggcttaaaagacccaattgttctatttttatgtcttgctacattcaacctctatttcaatgcttgatcactttttttcgttaactcaaatttgttaccattgcaccactggaatggtctgaagtcactttatactagggatgctgattctaaagttcatccagttgttgtacttttcttgaattacattcatttttaaagacttgaaattggttaataaaccaaaagtagatttttcgtttttttaagggtttattacgcatgaatagcgctgaaatcatggctgatctctccaaccacactccaatgatgcagcaatatctcaaagtcaaaaaagactatcaacatgcgttgctgttttatcgtatgggcgacttttatgaactgttctttgaagacgcgcatttagcagccaaacttttaggtattaccttaacccatcggggtaaagcaaacggcaacccgattccaatggcaggtgttccctaccattcagccgaaggttatttggcgcgtttagtaaaagccggccgaactgtagctatttgtgagcaagtcggtgaagttactggcaaaggcccggttgaacgcaaagttgttcgtattcttacaccgggtactttaaccgacgacgcactacttacaagttatcagtcctctaaccttgttgcgctatgtatccatcaaaaccagatcggttttgctttactcgacttaagtgcgggtatttttaaagttcaacaacaagactacaaaccggaacaacttccaattgaactggctcgcctcatgccaagtgaaattttgattgatgaagacctggttgacccgaatattatcgaacaaattaaaaaacatttagattgccctgtaaccaagcgcccaaatgtcgattttaatttaaacaatgcgcaaaaaaccttatgtgaccagttctctgtatcaacactctctggtttcggactagacccgttacctttggctaaggccgccgcggcagcacttattcactatgccaaagaaactcaaaaaacggcgttacctcatatccgttcaattcttttagaacaaagttctgactttattgcgctcgacccaatcacgcgccgtaacttagaaattattgaacctttgtttgagcatggaacttctttatttcagcttgtgaacgattgccaaaccgcaatgggtggacgtttacttagccgaacactcatgcaacctgttcgtgatacagcattacttgacgcacgtttagatgcgattgagcaattgattcaaggctaccatgaaagccctgttcgtctggtacttaaagaaattggtgatattgaacgtgttcttagtcgtgtggcgctgggtagtgcgcgaccacgtgatttagttcaacttcgtcatgcttgcgcgcaaattccatttttacgaaatgctttagcacctgttgtacaagcaaagaaatctaagttattaggacagctcgatcaggaattgggtgactttaaatcgcttcatcaacatttaatggctgcaattgttgaaaatccgcctgtattacttcgtgatggcaatgtaattgcagaaggttatgatgctgaacttgatgaattacgccaaattcgtgatcatgcaggtcaattcctcattgatttagaaataaaagagcgtgaacgtactggtattagcactttaaaaatcggttataaccgtgtgagtggttactacattgagctgactcgcgctcaagccgagcaagctcctgccgactatatccgccgtcaaacattaaagaatgccgagcgctacattacgcctgaactaaaaagttttgaagataaagttttatcaagtgagtcgcgtgcattagctcgtgaaaaagcattattcgaagctttacttgaaaaccttcgtgaaaatattgctcacctacaaatgatgagttcagcaatcgcgcaaattgatgtaattgcaaactttgctcatcaagcgcgtttaaacaactgggcacgccctgaatttacaccagaaaccggtattaagattcaaggtggccgtcatcctgtagttgaagcgttaagtaaagcgccatttacaccaaatgatactttccttgatgtgcagcaccgcatggcaattattaccggtccaaacatgggcggtaagtctacctttatgcgccaaacagcattaattagtttgcttgcttactgcggtagttacgttccggcacgagctgccaaacttggccccatcgaccgtatttttacccgtattggttcagccgatgacttatcaacaggcaaatccacctttatggttgagatgactgaaacttcacaaatcttgcaccatgcaacgaatcaatcgctcgtgttaatggatgaagttggtcgcggaaccagtacctacgatggtctttctttagcgtgggcttgtgtggttgatttaaccaaacgcgttaaatgtctttgcttgttcgcgactcactattttgaattaacagagttgggtagcgaacctggtattgataactaccatgtcactgctcaagagttaaacggtaatctcattttattgcataaagtccaacaaggaccagcgagccaaagtcatggtttacaagttgcaaaattagccggtattccagctaatgtgattaaagaagctcagaagcgtttacgtattttagagaagcaacaacagcagcatttacaaactagtgttcaaagtgatttgtttgcaactttagattcagaagttaccccaagcactcaagtcatagagaaagtgatagaagttgaagtctcttcacctgccctcgatttacttaagcaaatcgaagtagacaacctgactcctcgtcaggcacttgaacagctttatgagctaaaagcagcgcttaattcataatcactcattgagcaaacatgtgtataggcatgtttgctcttactttaaggagaataaaatttctattttcttaaggccactacaatacacagaaatcgatttaatttggcaacagattaatcgtcgtgaactgattacccaactctacttacaaaagcaagaacacttagaattaacagattgtttttatgatgttaaacattgggatgcttatcatttagaaaatgatccgcccaaattaaaagaactctatgaacaaggggctttatttatcggtgcttttgatgcgtctgaacagttggctggcattagtgtagtctcgaatcagactattactgattatcccgatgcaaaattactgcaatatttttacgtcgatgccgatcaacaaggtaaaggtattggtgcaaagctgatgcaagcggcaaaagaatcggccaagcaattggaagcccatcaactttatatttcagccactccaagtaagcgtacagtagatttctatataaagcatggcgcggtcgtattaaagcacccagatcgtcaattatgggaacttgaaccagaagacatccatttactttgtacactttaagctcattacttaaagattttttgtctatcgattcaacatagaggcaaaatttaaaagtaaatgttgtagttgaggtgtctgcttaaacagataccttgacccaaatgacattaaaactcatgacaaaaaaattatttaaactattgttttataaaacttattattatcctgattttataatttagctcttatttaagctgaaacattcttttgaatatcaatgtattaacttatcttcatatgtataaataaacaatatcaataaaagcaattgtttgtttaccccttttttgcctaaaataagctattcgaaatgaaaccatattttttaggtagctgtcgccatgacctttgttgtcactgaaaattgtattaaatgtaaataccaagattgcgtagaagtttgtcctgtagactgtttttacgaaggtccgaatttcctagtgattaatccggatgaatgtattgactgtgcattgtgtgaaccagaatgccctgcaaatgcaattttctctgaagatgagctaccagaaggtcaagaagtatttattgaattaaatgctgaactttctcaaaagtggcctaacattacccaaattggtgaacagcctgctgaccgcgaagaatggaacggcaaaccagataagttacagtatctagaaaaataatttcaaaaagatcagcaaccgctgatcttttttataccctattcaaacatttcattgcaaattcctcgtaatttgtgcactgttttgcattaaaataggcgcaatatttataagcttttgatttttcttatgcggaagtttttgcagagcatgctgcccctatgcataatccctgcgattatggtgggttgcgccagctctcctcaacacacaacaacaggcaaaacctctccaagcggtaagcgcatctttattcctcaagagcgcgttattatcgaacgtcctattccacctaaagttgaacctgcttcctatcgcgcttggttaaatacaggcgatcattatgaacgtgtacgcgaatatgaaaaattcctggcgcgtcatgatgtggcaggtatcgtaccaagttttgaattattaagatccgctcgtgattggcagaagtgtggccgttcagaatatgcggtacctaaccgtgaactttggaataattctttatcgaccttacgtgtctttaaatatcttattgccgcaaaagttttaaccgactttgaggtaacttcagtttaccgagacttacctttaaatgaatgtgcaggcggcgcaagttcttctaagcatttatttaactctgccatcgatttccgtattgggccagaagttccacagccacaagactatgcgtttattgaaaatacgaagtttaaattgtgtcagttctgggctcagcacggccaaagtttaaatttaggtattggattatatagttcaggacaaatccatattgatactcaaggctatcgtacttggggacctgacttaacccgcaatacatcaatgtgtaatttctaaaatataaatccccttatgcgcttcagtttaaggggatttgctcattctataatcaaccaaaatttcttgaatcgaagatttttgcactctagtcataaacgtttaaaatacgcctatcaacatacaggtaaatttgactatgcagcagatgtggacagacattgacgaatatatcgattcacatttaattcccgaagatcctcgactcgactttgcattaaaaaataccgacgaacacggcttttcaaatcatcttgcagttgctccaaatcaaggaatgttcttgcaaatgctcattcagatgaataaatgcaagcgtgttttagaaattgggacctttgctgcctacagtacaatctggttaggacgtgcactgcctgaagatggctatttgcttaccattgaaggtcgtgatactcatgcagaaatggctcaaaagaatatcgatcatgccaacctgcctgtaaaagttgaccttaaattaggccgtgctgccgatgtactttctgcaattgatcctcagtcgattgagccttttgattttatctttatcgatgccgataaacagggctatccggaatatttagaactcagtctcaaattttctaaatcgggcactattattgtgctagataatgtcatccgtgctggagatattttgaatcctgaaaacaaaaaaccaagtattgaaggcattcgtgaaacctttaaagccctagaaaatcatccgcaaattttgtcttgcacagctttacaaacggttggctcaaaaggtcatgatggttttgcaattgcaattgtgaaataatggttaaaaaatcatctttttcattttattatttataatcaataaattacttttattacccctgcttttccatatagttatccacaagatttgcggataactatatgcaaatctcatcatttagccacaagtaatggtacagtcgcgttacggaaaatcgtggttgcaatacttcccaagaagaactgatgtattttgctatggctaaatgcgccgagcacaataatttgaataccatgttcttgttggtactctagaatattttgcgccacatcaccgtatctataaacggtcactacatctagccccgcttgtttcaagtaatgctctggttcattcaatatttcaggatggtcaccgacataaactaaatggcactgtaaagtccgtaataggtcactttgtgcaatacggcgcatcattttttgacatgtcggagagtattcataagcgaaaataaaacgtgtcggtactttgaagttttcaccaatggtcaaaaccgtacaatttgcaccgcggataaagttttcaacattgctgccaatcggtttatgtttttcggcggctctttcacccacccgacccaaaatcacaatatcgttttcgtgtaagagattaaaactttgctctagaaaatcccctttttcctgaatttttgagcaagtaattccgtgtttttctttaattaagtcagagatatgtctgagtaaattattgctgtaatctaaagcgagttcactttgtttttgctctaattcagctaactctttaagcaacattgcattgctttcaaagccgattacgccactaatttcaccaaggtgataacttgccgggtagtaatctagaatttgtaataatacaagctctcgtccagttgctttcgcaacccaagccgctgcatctgcaatagcattaatacaaggtgatgagtcaatacacgcaataacacggttcatttttgcctctcttcttcaggtctatttgccttggagatttttctataacttagctttaacttaacatagataaaaatccgtatgttaaggtttatgtattaaaatccacttttttgtttaaagatcaaacattttattacattcttgagactgcattattctcttaaacggataaattttgctgggtttcctcccacaatatggtacggctccacatcttttgtcaccatactattcatgccaactacagcatgtttaccaattttaatcccgtctttaatccccacatgcgcacctaaccaaacatctttttcaatttcgataccctgtgagcgaaccggctgttggtaaagtggacggtcgagttgcatgccatgatcaaatgcatagagatgacaataagcagcaatacgaacttgatcatgtagttttatgcctgctcgaccgccatctaaaatacagtggtggttaatagcaacttcattaccaatctcaagcggtccatgcaaactacaatctgccgcgataaaacaattattaccaatcttaattttccggcccggctcggcaaaaatatgggctaacggtgaaataaaacagttctccccgatctcgaccgtttccatatccattaaataagcctgatattctttttgccattcttccgcccaaacacggtgtttgggtttcaatgtccaatatagccatggcatataatttaaacggtgtttatgttgctcgcggtacttgagtaaagaatcagtcatcagtcaattcctcctcaacttttaattcttcgcgaccacgagtcacatctcgtagttttagagcgagtggttcaatttggtgaacctgtaatctcgcttcgatatcgacacctgttgcagtataactttcctgatattcaatttgctgctgtgtcagctcatactgaaagatggcccattcattaaaatgacaagaaaaatgaatcgttttcttggcaatcagttcaatacgttcagctaacaataatgattgtccggcacaaccaccatatgcccgaacaagcccaccagttcccagttttataccgccataccagcgattcaccatgacaataatattagtcaggtcatttccttcaatagttgccagaattggacgtcccgctgtaccagatggttccccatcatcattaaagcgaacgttatgcccaattttccatgcccaacattgatgtgtggtcgagatatctttatttaattctaaaaactctttcacttgctgttcattttctactggcgcagcaatcgcctgaaatctactttttttaatttcttcttcaaaagtaacgggtgatgcaattgtaaaagccataaatgaaataaagcataataaaaatcaaattataacgtgaatttaatagaagcaaacctataaaaaagccccgaatttcggggctttttttcttatctttctcttaatgcttctttggctttattaaatggtttaagtaagtaatccagtacagtcttctcaccagtacgaatatctacagttgccaccatacccggtgtaataccgaatgctttaccttctttattgtaaagcttgtcggagtcagttcggatataaacacgataatagaattgatcctgtttcacttcatcgcgaatggtatctggagaaataaccgtaaccttaccttttaaaccaccataaattgagtagtcataggccgtgatcttaaccaaagcttcttgaccaggacgaatgaacgcaatgtcacgtggcaaaatacgggcttcaattaataactgttcatcaattggcacgatggtcattaacttaccgttttgtggaatcacaccgccatgcgttgtcactgtaatttcttttaccacaccgcgcacaggagctttaaatacggcacgttgtaaactgtcattacggcccatgacaacttgttgttgagtttgcgtgtcagtatttgctttagataactcttcacgtgccttaacgtagtattggttacgtgcatcgttcatcttgttttgcaaatcatttgcttcacggcgtaagcgtaaaacctcaacctcacttgccgcacctttggcaaccaaaggctctgtcatggccaattcttgctgaaccagttgtaaagcctgtcttaatcctgaaagcgtttgttcaagatcagctctgcgtgattcatacaaagcagtctcttcatgaacaagcttcggatcttgtgcaactatttcagggaaaaccagtggtgtaccgttcacttccgcacgtaaacgtgctgctgtggcctgagctgcaattaataaagatctcgactcacccacatttgaagcaaaacgagttgggtcgagctgagcaagaatttgccctttttggacaatatcgccttcttgtacatttagcttagttaaaataccgccctctaaagactggatgacctgttctttagatgatgggataaccttacctgtaccggttgaaacttcttcaagcttaaaaaaccatgcccagataaagaaaatcactaaaccaatgcccacgatccagatgactaaactggcacgcggtaatggtggttcactataagatacattcattgaacgggtaagttcttgttgttgttcgctcatgaattgcccccttggctcacttgtttttgttgggctgtagattgattaagtacctgatctcgtggtccatccatcacaattttgccttcattgacgacaataattcgatcgaccagttcaagaacagctcggcggtgggtcgccacaaccaacgttcggtgtgctaaccatcctttgagatgatcaattaattgtttctctgcaacatcatcaatggctgctgtcggctcatcaagcaataaaatattcggttgacgaatcaataaacgagccaataataacgcttgtttctgaccaccagagaaaccaacgcctccttctaaaaccaagtaatccaagccttcttttttctcttgaacaaaagataaagcacctgttaccactaatgcacgaagaatatcttcatctgttgcaagcggtgcacctaaagtcaggttttcacggattgttccgtagaataaatgtgcattctggttgagtagccccatatctcggcgcacatctgatggatcaattaaggaaagatcgagtccatctaaatgcacagctccctgagttggaacctgcataccggataaaagctgaagcaatgtcgacttaccagcaccattacgacccaaaatcgcaattttttctccggcgcgaatttttaaatggcggatcgcaagacttggtctcggatcttcttctccatattggaacaagatattttttaattcatagtcgccatttaaaacagctttgtgtaccagatgtgaacggtcggcctgatcaatcggacgttgcataagttcatctaaactttgcttagcaacttttgcctgttgtagacgacctaatacgcccgtaatctgggcaattggccctaacatacgcgaagataaaattgaacatgcgactaacgcacctgtggtcatttcaccgtccattaccgcaaaacagcccactaacaccacaatggcataagttaaaccctgaaccatttgggtccaagccattaaggtacccacaattttacgctgtctcataccaatgtcggctgagacttcattcatatggttccattggttttggaatcgtgattcagcacgtaagagcttaatgtcttcaataccttgtaccgcttctaccaaaattgcgttacgaattgaagattctctcatgccttcttgtgccagttgagccaacttcttctgtaccaaaatacccggcaagatcataagcggcacaacaagtagcattacccagaacagttttccaccaataatggcaaaaattactaagaacaggaaaaagaacggaaaatcggcaatcgcactaattgtagttgaggtgaccagttcacgaacgccttcgagttcacgaatctgggaaataaaactacctgtagatttcgagcgatctttatttttaattcttaaggcatggccaaatacacgatccgacacacgtaaatcagcacgtttaccaatgatatcggataaatatactcgtgaaacacgtaaggtaaactcaaaaagagcggcaatcagtacaccacccgccaaaacccataaagtgggaattgactgggatggaaccacgcggtcatacacttgcatcgagaaaataatggttgccagtgccaacacattggcaatcagcgaggcaaacataatatcaacgtagcgtttccagtctcttaaaacgattgaccagaaccagttggcttcataaggtttgatatattcgtcaatacgtgcatctggaatagacgtttcaggacgcaagatatagacatttttaagtgtagtttttaaagcgtctaaagataaactttgtgaaaggccctgatctccactgaactggatactcacatttccttgggtatcagccttatcgattacaccgacttgaccatcattaaactccaccatgacaggtaaacgccatgggttgagtaagtctaaggaaaatggtgccttacgaagattcagaccgacttgacgtgtcattaactgcaagacgttatctaaattctgattttggttccaatcaagttgtaaacggattctttcttctgaaggctctattcgataatgtttagcaatagttaagaccgcctgtagccaaggctggtaatttatttttgtcatcatggttgtacttcgaacccctgaattgaaatattatttaagccataggcttggcgggaacgtcctgttgcttcaatgtactgaacaatgctgctataaatgtcataacgtgctgattcgagttctgagttggcactatgaatagcttgttcagcatttaataaatcgaccaatgaacgcgtaccgagcttgtattgctcttgatagagttcacgtgtacgaaccgttgttgcttggcgacttgccaaaacctgcatttgacgctgtttattttcaatctgttcgcgacttgttctaatttggtccagaacatccatatacaccgaattcactttggcttttgcagcttcttcggcataacttgccatttttacttgtgaagctgtagcaccaccttggtaaaactgactggttgcttcaagcatgactgaactatataaaccgtcatctttgtcgttattcgggtttttaccattaatcgcctgacttaccgaacctttcacagccaaggtcggatatcgggttaaacgggtttgttgtttttgagcttttgcaacctcaacacctgcctgcgcggcaatcatttttggaatggtattaaactcaggttcaccataaagatcagattgcttcacgagatcatcggaaataatccatccggtatgactaacatctgcacctaataaggttcttaaatgctgttggtattgacgtaataatgattgctgagcaatcaaagcagactgcgctgcctgtaagtatgattgcgcctgaattgggtctgcttgactcgcgacaccagcgtttgcacgcaggttagcaatttcctgaatacgtcgaataccggcaatttgctgctcagcaattttattaagctgtagataacgctgaatattcacaatggtctgtgcaacatccaaagctagagtatcaacgctaaccaagacattggcttgttcaacctgaactttcgcttcttcaacatcaacacctgatttgactttaccgaagtcataaagcatttgagtagcacttaaggttaataactgccgacctcgttctccactgcttaaatcaccagtcgtaatccctcctgaaagctggggatagtaaccggctttagcaacgtcaactcctgaattttgacctgctaaagttgcaatagattgtgaaatatcggggctacgctgaatggcaatttttaccgcatcttgcaatgtcatcgttctagatggcaagttagaaaaagatgaagctcgattatcattaagttgaacagtaggaaattcctgcacaatagaacggtctagcttaaaattactaagcttgtgcattttggcaactttaaagtcatcactacttttagggacaaaaagttgtgacaagttctctttcagggtgtggtattgctcacttggcttagcagcgtatatcacgacaggtacatgtagtgtacttaaaagcataagccctttcaggaaagcctgctttctacatatccctcttactcttctttggttatatccaatcatgcttatcttgttgatcttgtttgttatcgtttaaaagcttctacattctacatagtttttcacctaaagcagcataattgatggaataaatcacacattattttttcattaaatgattgatatatgtatttgtttttatttataaaatactaaaaaataaaaaaagaggccttgacctctttttaaccaaacagattaatgtctttaattaaactgtgaaatcatcacctaaatagactttacgtacctgttcattgtctaaaatttcttgtggtgtgccttcggcaattaccgagccttcacttacaatataagcacgttcacagattgctaaagtttcacgaacattgtgatcggtaatgaggacaccaatacctcgatccttcaaggtctggataatatctttaatatcgcccactgaaattgggtcaacaccagcgaacggctcatccaaaagcataaatttcggatctgcggccaaagcacgtgcaatttctgcacgacgacgttcaccaccagatacactcattcccaatgaatctttaatatgactaattttaaagtcatttaataactcagtaaggcgctgttgacgttgctgtttattcaaatctttacgcgtctctaagatcgacataatattttcagcaatcgtcaattttctaaagatagaagcttcttgaggtaaataaccaatacccttacgtgcacgttcatgcatcgctaggtctgacatatccaagtcatcaagatgaatctcacctttatccatgcgcactagtccaaccaccatatagaaactggtggtttttccagcgccgttaggaccaagcaaaccaacaatctgtccactttgcatactaaaagagacgtctttgacaacccaacgcttactatagttttttgctaagtgtttaatacacaaagtttgcggttgttgaagagcttgctgcattagtcacgcgctcctgggaaactttttgaacttgaaggtggaataatgatttgtacacggtttgaagaagaaccttgagcttcaacatcacccttattcatactatatttcagggtgttaccgcgaatacttgaaccatcttggtataaatatgcaccgccagacaaggtaataatgcctgtatctgcattataaacaatcgtttgtccttcaccgcgtgcaatacctttatcagcacttatttgttgctgaaacttagacggtctacctttagcagtgatcgtttgaatttcacgtttagagtttagtgtagccacaattgagtcggcctgaagcttcatggtgccttgctcaatcacgacattacccgtataagtcgtcaaaccggttttttcattataagttgcacggtctgccactaacgaaatttgttgattacggtcagacggcaaagcaaaagtcgaagcagatgataaagcaacgaatgtaattaccgcagcttgttttaggaaagctgaagaacgttttaaattaagactttggtgcatactttcctcgaatattaaaaaattcgtactgaccattattcaaattggcttttagtcctttgctcacaaactcgccttgtggagactgaactgtcacttgatgattagtttcaatgtctctagtttttggataaccagttaattcatcggtttgaaactcaatggttccttgcggtgccaacttagtggctaccacgtcacccgataacacaaccttttgattatcatcatatccataagcttgtttagcaaagaatgttgcatcaactttacctaatttatacatagtggcattgagttgatccaactttgacgttttttgttgcatatcctgttcaagctgacgaacttcagcacgaatatacaaattgcctttgtcatcagtttgagtcaaatggacgccctgcgccgaataagtcatattcttcgccgaaccaatgtccagtttttttgccttgccactatagtagtagtaaccaccactcacagcagcaaccactacagcaacaatatataaaactctggtatccatgagcaggaatagcctacctttttaagtaatcttgttattaatgcggtactgcaagatatttttcaagaagttcttggtaaatgccttttgcgatcagcaacatatcacaaacttcacgcacagctccacggccacccatcgcctgtgttaccaaattcgcacgacggcgcacttcctcatgtccgtttggaacagtaacactcattccggcaatggcaaatgctgagagatccggccaatcatcacccatatataagcagtctgaaggcagaatattaaactgtgcacacgcttcacgtaatgccgagcctttatcttcacggccttggaaaaccagatcgacgcctaaatcggacatgcgtttttcaacgatattactttttcgtccagtaataatgatgactttcatacccgcttgttgcgcaagtttcatacccaaaccatcacgaatgtcgaatgatttaatttcatcgcccgtgttggttaatgtcacaaagccatcacttaaaataccatcaacatccagaaccaatgcctgcaaatgacgtgcttgttctaacaatgcatacgatgccattgattaattcacccctgcctgaataaggtcatgcatactaattacaccaatcactttgttctggtcatcgactaccacaaactgactgatttttttctggttaagttgttgtaaagcttctacagctcgggcttcttgagagatcgttgacggtttctttgtcatcacttcagacacaggtaaatttacatcaaacccttgttgtttatcgatgagacgacgtaaatccccatctgtaaaaataccgagtagatggtcttgttcatcaacaattgttgtcaaacctaaacgcttatttgagatctcgtaaagcacttgattcattggagtattaggtgaaacttttggtaactcgtcgcctgtatgcattaaatgttttacatgtaacagtaaacgcttacccaacgcacctgccggatgcgaacgagcaaagtcatcagcagtaaaaccacgagcttcaagtaaagcaactgctaaagcatcgcctaaaaccaaagtcgctgtcgtacttgaagtaggcgctaaacctaaagggcatgcttcgtcagactcacccagagttaaagcaatatctgcattttgcggcattgggcctttatcatcacgactaatcgtaataagaggtacaccaagatgcttaatgagtggcattaacatcatgatttcatcgctttttcccgagttggaaattgcaataagtacatcaccacgaacgagcattcctaaatcgccatgccctgcttcgccaggatgcataaagaaagacggcgtgcctgtcgaagcaaatgtcgctgccatttttcggccaatatgcccagatttacccatacccgtgatcacaacacgacctttgcattgtaataatatttcacaagcacgattaaaacggtcatcaatttgtgttgctaatacatctatggcttgttgctcaatacgcaatgtcgctaatgcactgctttggaaatctgtaggattaggcatacgagtttgactcaaaataattgatctgatctctggttgagatcggtgattttaatcaaaagatttgggggcattctagcataactcaatcagttacacgtttttaaatgtataagatttcacaagcttataaaattcatgcataaaactttgttaaaaatgatgcatcagttatgatgtaacactatttttgttgagtgtttgaaaacccttatgcaaccgtttgttttatataactctgagcaacgaaaaaaagttgaatttgtacctcgcaaagaaggtcacatcgatatgtacgtctgcggtatgaccgtttacgactactgtcatatcggacatgctcgagttatggttgcatttgactacattatccgttttttgcgtagtcaaggctggaaagtccgctacattcgcaacattaccgatattgatgacaaaatcatcaaacgtgcgaatgagaatggtgaaacaatccaacagctcaccacgcgtttcatcgatgccatgaatgaagatgcagcgaacttaggctgtttagcaccagatgaagcacctaaagcgactgaatatattgaccagatgcaaaatatgattggcaatttggtaaataaaggcgctgcttaccctgcttcaaacggtgatgtttattttgaagtcaccaaatttgaaaaatatggtcgcctctctggccgtaagcttgaggatatgcaagctggcgcaagtgagcgtgttgatgtagaagttgaaaagaaacatccttttgactttgtgctttggaaacatgcaaaagaaaatgaaccatcttgggcgtccccttggggtaatggccgtccaggttggcacattgaatgttctgcaatgtcgacttgctgcctaggcaatcactttgacattcatggtggcggttcagatttaatgttcccgcaccatgaaaatgaaattgcgcaaagtgaagcttcgactggtgagcaatatgtaaactactggatgcatgttggctttattaacgttgatggtgaaaagatgtctaaatctttaggcaacttctttacgattcgtgacgtaatggagaaattccacccagaagtgatccgctactttattgtgtcttcacactatcgtagccctgtgaacttctctgatgtagcacttaaagaggcaaaaacttctttaactcgtttctatcattcatttaaagcttatcaacaagtgtacggtcaaacgacaactgaagcgcttgatcaaagctttattgaacgctttaacaatgcaatgtgtgacgatttcaatactgccgaagcaatggctgtattgtttgaactgaacaaagagttaaaccgtgctgtaaaagaagagcaagctgaccaagcgactgtgctttattcgacattacgtcacctcaccaacattttaggtttggtacaacacaatgtagacgatttcttaaaatcagatattggacaagatgcacttgctttgtctgatgctgaaattgaagatttcattcaacaacgtgttgatgcgaaaaaagcaaaagactttgctaaagcagatagcattcgtcagtctttacttgagcaaggcgtagttcttgaagacactcgccaaggtacagtttggcgtcgtgctgattaaacgttcaattagatcacaagagtgttgacactttaatgaaacactctataatgtgctcacattgcgggaatagctcagttggtagagcataaccttgccaaggttggggtcgcgagttcgagtctcgtttcccgctccaaaattcaaaaaccacttaattcgaaagaattaggtggtttttttattggctgttgattagctttgactactcaaaatagtcaaaattcgcattaaaaaatgctttatatttccgtgccccttttgaacagtactatcaagaagaaggcagaaaaatgaatagtgcccgcttaattgttcaaatacttaaatgcctaaagaaaaaagaataatgaaaatataattaatattttatgattaaacccatcattaagtttttattgatattgaaattaaaaaatggcttaaaattaaaaattaggttaaaagtatattatcgcaaagtctcccccattgaggagactttctaagtattaaatgacttaaggatgaatttttttcaatccatcttctacagcaaatttagcgtcctcccactgtaagcgtgaactgcctttaacttgttcccatttagttttcaatttagattcaacctcggaaaaattaatttctgcattattatctacacgattttcataacctaaacgataagccgcccgataatcacgatcatattctagattcttgtcttcagtataatatggcatttttttatagttttctcgccaataattatcttcttcttgccagtcattactatcatctttttgattatttgtttgagctatatcattacctgctattgcccctaccacaccaccaataatccccccaacaacagcacctggagggccaccaacaacaccaaatgcagcacctaccgccgctcctcccaaggttcctgcacctgtagcaaccaaattctctcctgcttcattcatatcgggtacatgattgttattagtcggtcgagagtttaaatctggacgagcattatcaattgtggatgaaatatcttgtaatggtttgctatttgatacattaccattagaagatggctctttttgagtcgtatgattaccaactgaatttgattgttttgtatttaccattttcttactccctatattttaaaatctagtgtctttcaaaagagctagaatattaaaagaacttttgaagtatgcttgacaattattattataattcacctttaggttagttatgtttcataaatacccctattaagtaaggagatgttattaattaaagaaattatttctcatcaataaaaattcttattcaaataatcttcacaattatatcattctttatcacacaatcattatatttcgctagattaaacattacccacaacactctagttttacaccaccctgcaggaaattattattttatgtatatgcaatttaaaaaagcctagttaattaatactaggctttttaaatgcatttttaaaagataataattatatattatttcatatttttaaatatatcttcagctgcttttaggtgtttcgcaacagcatcacgtgtttgtacaagcatattttttaattcagaacttttcgtgtttggtattaactgcttatcaattatcgttaaaactttacggtgaactttaacttgactcatcatataatttttatcagtatctgatgttatttgattaagcttactaacaattttatcactatcattttgcaatgatttactaagattactggtttgtgaaatcaactgtaaccgacttgccaacgcttgtgcatttttttcattggctgaatgttctttaatcatcatttcagcatatttcttagcttcatccatttttagttttggcaatgcagtttttgcctgcttaatttcaccattattagctgtacttaatatcttgaaaatttgactatcagtcaaattttcatggttttcatttaatattttagagtgattcttcccatcatttatagtttgttgattcgctgccataatctcaaatgcactgaagcttaaaacaccactaattgcgatacagctaataattttcttcgttaaaatagctttcataccaatatcctttaacttaattcatgagtatttctacctatgggtagctttttcacatttccaatctatatccctacttgtaaattcaaggttggggttatttattcattatttcaatcaaccatatttataccgctcgttgaatattcttcgcaaagggtaaatagcttatttaaagtagatgatataaatttaataatgaatcatgcctctgtatccaatcttattaatgtaaatataaaatatatataattttaaaaaacattaacttaaaaaaatttttattttttatttttacgaaaataacaataaagctcgttatattaacttatagatactaaagctaaaattaaatatatttaaagaaaatttaaaccaatttaacttattcacccatctataaaaaagcgttctcctaaagactttaattcacacactgcacacaaacagtgacatgcacttttgtagatatcgtatgagctgtgcaacctgaaagtagaatacacagcgaaatcagagccttcatagtgaaacgcggttagcaatccagccataaaggaattgttcctgcgtgggatttcactcacaaatttcgatgtaacgttggccttgcatgatattaagaacccgaactaataccttctctccttctttaccgcgcttagccagtgttagcgaagaggtaagtaagaaataaagttctatcttccaacctaagctagccatttcctcctaacactcacatatttttagctaattcttttgccaaacattgttcatgccaagtggtttggaaattctcgacagcttttgacttaatgagagggtcttcaaataattttgaagaatatgcagatttaataagctcttgataaagttgtttggcttgttgttcttcaagatgattggcgatgtcatgtaactctttagctggcacttcatgttgtctagcatccatcacgccactcgctgcttttttcacagtttcgcagtaatgaagctccatcgcttcggatgctgcataacattgaattgaaattgcgcttataaagaggaatataaatctcataatctcaccttaatttgacgcgcaaggttagcaactaatctcccaaaatttaagttaaaaaaggttaatttttctatactcttattttatttcaccttttgcacttgagtatcagaggcttttagcacttttccatctgctgtgactggtgccataaatggaatttgctgacctgtatttttatcaattaacagagaatggcgctcaccactttcgaataagttgtgttctccccattgacgtagagcaacaatcacaggaaataaactctcccctttaggagttagcacatattcctgataagccgtaccatctgaagcatcttgcatttcgagaacacctgcttccaccaactttttcagcctgtcagaaagaatatttcgtgcaacgcctaagctccgctggaaatctccaaaacggcgcattccgtcaaatgcatcgcgcacaataagcagtgaccagcgatctccgatgagattgacgcagcgtgcaacaggacaaggttcttctttcatcaatgttgagttaggcattgagtttccttaccaataatcagtaacaagatatctagttgcattttaaaaccagtcaatctaatattcaactagttgcattttaaaactagattgaatggatttaggacaatgaaagcttctcttgtatcttcaaagtcttcggtagataacaataaaacgcattcgaacctacctcgtagcgtagttttactatttgctatagcaagtggtgtaagcgtagcaaatgtctattatgcacagcctttgctcgacatcttggcgagtgactttaatattagtcatgccgccattggtggtgtggttacagccactcaaataggttgtgcacttgccctcgtgtttttagtgccgttgggtgatcttataaatcggcgtcggttaatggctatacagttaatggctttaatatctgcattgctaatggttgcctttgcccactctacaattgttcttttgacaggaatgcttgcggtgggtctactcggcacagccatgacacaaggacttattgcctatgcagcaagtgctgcggccccacatgagcaagggcatgtggtcggtactgcacagagtggtgtgttcattgggttactgcttgcccgtgtattttcagggggaattagtgatgtggcgggttggcgcggcgtgtacttttgcgcagctatcattatgctcatgattgccttaccactttggaggcgactccctcatttaaatgttcagcctgttaccatgcgctacccgcaacttctagcttctatgttaaagctactgcgccaagaaaaagtcctacaagtacgcggtgtattagccttattcatgttcgcggcatttaatattttctggagcgcattggtactaccgttaagtgcaccaccctataacttttcgcatactgtaattgggtcttttggactgttcggtgtaatcggtgctctagccgccactcgtgctggccaatgggccgaccgcggatatgctcagcacacaagcttggcagcactgttaatattgctgctcgcatggtggccgctttcacttatgacctactcactttgggcgctggtgattggcatagtattgctcgacttaggtggacaagccctgcatgtgaccaaccaaagtatgatttttcgtactcgcccagaagcgcatagtcggcttgtgggtctatacatgctcttttatgcagtaggtagtggagtgggtgcaatcagcacaacagcgacttatgcttatgcaggatggctcggcgtatgtagtctaggcgcatgtgtgagtttattggcgttattattttggtggagaacgatgaagctataacccaagtattttaaaagttcgttcatctaattctctcaattcatccaaagtatagagccgcccctttggatcaaaaaatttatcaaaatcaaattgcccttctttatataacttataacgtttagggcctaaccattctttttggaaaaaattatcggtcagattaaaaaactctttgaaggaaatatttgcatctatttggcccattaactgagtccgctcatctttaggaatatctcgtacttttctttcatccataacgaaagatcggttcccaataagccttccatccttactgacaggaaccagaatacttcgacaattcggatgcaaaggtggcactcttttcgccgagtcattcagtttccaaatagaaccatcaacggctgcacagattttagaagttctaccatctaaaacactcacgaaccttacatattcaaaattaaaatttttgaagttatataaatagacctgatttgatatatggctacgtagcgttctaataattctttcaatatcgattttggtactgttgagcaatccatcttcgtacttaaggcgttttgtaccagtaatacgtttgatgatttgctgaggcgtcattccggtattcataccatcccgaatagcatattcaatgcgttgaagggcattttcactaatttgagctaaggattcatcaaccaaggcacctccagccaaaggcactcgttttattgactgataaagctgctctccctctaaatctttaataaccttaccaaatagtttggccatatagtttgactcatatatagccaaagcagttgccgaatgagtaaacatttccggtaaaacagtattaattgaattaaaccagttcgaaataacaagttggatgttttttagatgctgagttgtatactctccaccagcaagagcaaacttctcagtttcattcagctctttcattaaattgcttaaccgatcaagcataaccatcgtttcactattaaaaaacttataaagttcatttaccgatcgcgatgatgctcggtagagataagcttgatgctgggtaaagacatcaaaaagtgatttttcagtaatattcttcatgtaagttacctctacaaaggtgcactttatttttctttttatatcgctgttctataaaatttattaatagttttgagtagttaaaaagtttataaagctaattaaaatagtacttttgttttacaaactttttttgcacactaatatttctaataaaattagtgagccacaaaataaactcatctctatactcaaaacgaggaagtagacttaagtcaacttttatctctctttcagaaagaggcttagttaaacattcttcaaaatcaattttggtatattttaactttaaatcattttgttcggcttcttttctaatttctgccatcactctattgagattggttacagggttatccgtaatctggtacttttcatacatattttcgtatacattttcggcaatatctaaatatttaatgagttcagcattctcattcatctcttcatcatcctatttttttggaaattatgtaccagtaaatgtttctatacgtaatttaagattatttttatgtgaaaaatattttaataagaataacaatataatctccaacttattattttttatgtcattattaattctttataaaacatttccatatttactgacattttgataagttttatatgctgatcatttaagcttgttaaataaaaaaaccgccccagaaggcggtagctgaatattatcagccagatatagaagtaaggtggacaaatacttctatatttaagaggatattttattatttttaatgaaatcctcagatttaaagtagttaataatcatctcagcattttcttctttgcttggttcagcagccacaggaatttcggcttgatcaattttaaagccttttggaatatagtttgaaattggaggaagcttctctttccctccaattgtcattcgctcaataaagcctgcaagccacaaaatgaattcatcttcatttttaaacttgggcataagacttaaatcaatatgcactgatttttctttattaaattgatttaagcattcttcaaaatttataaaattgtacttaagtttgaactcagtacctttaattgctttgcgaatcaagctaattaaacaatttaaattttgaatggtatcttcagtaaataaattatcttttttaatttccttgtatactttctccgctatagctaaatactttggcatttcttcctcctcaatattattataaataattgaaaataaaaaaattcatcttctgattatgaagacttaattgtaattgagtgcaaataaatataaaacaatgtaagaactacccatattatgtaaaattgcaccataacggaacacaaatagtcaaactaatgttaaatgtttcacaattttatttaatacttttaactaattagaaatattttctttcaattgtaaatgattatttttcacacaacatgagtaataaattatcattaaaaacaatgtagaaataatttttataagtacctctcatgcttctagattcaccatactttagtcttttttcagtcataaatttgaagaaaaacttaattaaagatgaggttataacacctacccatctgttatatttttttgaaaaaattctgtatctatgattacaccttgcctttcttcatgatagtaactatctagacacgaggtagctaacatgagttttttaagaaagaaaaataaagctagttttgtactatttattattaccctctattcaatgctagggttcggcttaggttttattatttgggagtatttcctacaaattccataacttgagctaataattgatttttaaagtagccgttttgatggttctttgaaagataatgtttgctttacctttatacggctaaaccatggtggttaaaaaaataccttccaaatataaggtgttaatatttggaaggcactttgtaatcagctaaagctagtgtctcgtaatttctgcattaatttctaagcttatttctttactacgatggtaagctgcttttaaagccagccgaatatcatcagagaggttgcctaattcaaacattcgtaatgcagactctgtaataccattcgctaatgtgaccttgccacataactcactaggctgaacattacttttacgaaccatttctacagcgcctgatgcagcttgaagtattagatctaaagcaaattgcttatctagccccatagacacccctgttttcaccatactgtcgagaatatagaagaagtaagctggtcctgaacccgataaagcaataatcgcatcactttgggattctgaatttgcccaataggttcgccctgttgctgagtaaattgtttctatcacttctttatctaaaggctctaaatagtctgaaccaattaacacatgagtacctgtataggttaatacagggggattagaaatgactctgataattttttttgaacccgtaatactcattaattgtttaatattaactccggccatcatcgacacaatagttttatcagctaaccatttttttaagggcgccagtatagcctttaagtcttttgggtctagtaatagaacaactatatctgcctttttcacctcatgttgcttttgctttagaatgatttgattctcaaatttgacttcctctattagattaattttttctctttgaaagccttttaaaactaaacctccaattaaagctaaagacaaattactgctaccaatgaagcaaatattaggctgtactatattcaacatttagaattatttccttcctttagatatactacaaaaagaaatattatttatgacgtaagtcatgcaccgttaagacaagaaaaatttaataaattttcatgaatgttaagtttaattttacaacgattttaaattctgagctaagattactctttacttatgactttatgaataacaaattaatctaaattgttaaaaatatgtaattaaaaataatttttagcttatctcattaaagaaatagacttaccagacttaaagtatttaattaaaatttacttaataacaactttgctcttttttaaagaaactttcagctattctggaggcttcttgaaaattgatttcattacacacccaaaatgataaaagctttccatccaaatggaaatattgcttgtgatactccgttacatcatctgaatgaggatttcctatagagaaataattttcattattctttcttactttaccgtttaaaataccgccaatacaaatatccatttttataccagttataaagtcaacttatacaacacaattctaatttctatattatataaaacaaataatcaacttatttaattatccatataaaaaacccacaaaggaagaagtgggttttttaactatattgatgattagagccgtttaattgagcaaatcactacagatcaaatcgtctaaaatcatcaaattactttagtttaagcattcgtcacaattgtgatattcgaagcttgtgggccttttttaccctgtgttacagtaaactgaacacgctgaccttctaaaagaactttaaagccttgtgtttgaatctcagaaaaatgtgcaaaaacatctttaccttcatcagtttgaataaaaccgaaacctttagtttcattaaaccattttactgtaccagtagtattagacataaattaatcctaacttttaaaaacattatcatttattattgggcaaaccaatagaactaaaaaatacacattctacttaaatatctaaaaatatacggaggattataaataaaactgcgaaaagagagactttgggtaacatgaatatttttgtagttagtgtcgactatacacgcttcttaacgaattgcaatcgatatcttaattaattcatttcttattgaatacgaaggtatcaaattctaactttctatctgattttcaatgatatttaaatataattttctaacactgtatctatatattaattaaacatatttaatgctttttaaagtattggatttttaattttcaaattatttagagttaaaaaaaataagattgtgtaggaactttcaaatattatcctattaatttacttttttataaattatacatacttgtctgtatacataattcctattctgctttaaagtaggcatgcaattaacatattgatgataaacaggaagtatcaacgtgagcggtcttttagtttttataaccattgcctttcttactttatcaagcccaggcccaggcgttttatttacagtaacaaattcaataaattatggtgtgagaacagctttatttggcattagtggtttaattattggtatgtttattatcgctgtgatttctgcaagcggtgtcggacttattattactagcaaccctactatcttcactgctttaaaatttattggggccttttacttaatgtacttaggttataaaaattttattaaaaaatccccaactcaagacttattagaaactgaacataatgaaaaagatataaggaaatcaaagcttttctatcaagggttgtttgcctcactacttaatcccaaaacaattgtcttttttattgcccttttcccacagtttattgatattaaaaaagaaatattaaatcagtttttgattttatctttaacattctgcttgatcggatttttaattcatttagtttatgccaacttttcctctatattcaaagagaagatgcttgccggaaataatttttctaagctcaataaagtcagtggttgtatattttttcttttagcagttttacttattactcaataaaactattttatgaaagtgagccaacttgtaaggctataactcaatagctttagcaagttggcttttttataagctgatacgattagcaagccatccataaaagaattgctcatgcttcggatttgtttccgtaatttcaatatagcgctggccttgcataatattaagaagccgtaccagcactttttcaccttccttaccacggtttttaatatattttattaaagcctgcaaagtggctggcccatattcaccatctaccttaaggtctacccagtcttctttgccctgcctattcaataaatttaatgcacgttgtaaaagtggtttcgtgaaactaataccacaattcacacccgtgtcgaataactcttcagcaacaagtgcgctgatcaaattaacttgatcaaatcgcggctcaagccaatattgattcctataaatttctctggctgtctctaaggttaaattctccattgtaccttgataaccataactacgagcaacggcttgtgtaattccaaatttagtcgcatgcccatgatcaagtggatcatttacatagccaccttcgcgttttattagtgcatctaaatattgctcaatattcataagagttgtcctcatctttattagggccaaacagctattagctttggatatcatctttcgctttttttagatctttcatgacttcaacaatggtttttccttcttgtttattaatgaaattaaatatccacctcacaattgcccaaccaggtaagccacaaataaagaagaatccacctaaagtgatcattccccatatatctgtcacccactcatgtaaattccatttcatgataatgaatgagccaccagtcaagcttgaaacaaccgtacaaatcaaacccacgacccattcttgaggtgaacgtggaaaccgcataattaaaactactgcaacaactaagctcactgctaaaaccaccatcatgacagtgccatagagattaaaagcggcagctagcccatttgaagttaaaaaattttccataatttaatcctgcctaaagcgtaattttttgaaaaataatcatggctactgctttgttatttttcatatttttatatctaactctgctatgtacacagatttaatctagtcgatcttgttctttttaaaccgctatgaatgacataagcctcagtaaaactacaccgctagataacctctcttttttgaccaaaaagttgagataacaggttgccgtatatcggaaacttttgtgacgcattaaattctttgttagattcttcatgttcttgataccctttatcgacgaacattaagcctgatccacggaatcgggctttttttattccatttcttgtttttaatagtcggtacaaaccactcatcgactatcgccatttttatattctgtcgtccagtgaggcagaataatcgttactttcttaataaggtattgataaaattaagaaatcaatttcaaataaaatattattttcgttctatcaatatgtccttataactgatattataactatagttattattagtcaataactatagttgttttactaaatataacttaagttatatatttgttataagttagctggtgcgatcattatggctcttaaagaccgtttaaaagattcaaggattaaagctaaaagaacacaggcagaggttgctgaagcagtaaagatgtctcagcctgcttatcaagctttagaatcggggaagaatttaaaatctgcttttcttccactcattgcacagtttttaggtgtagatgcttattggcttactacaggaaactcagaagactcttttagagaaagtgatgtatttaatcctactgttgtgagtaacgatgcagcagaccaatatgtctggatcgaagtagttgaagcgagtttttcttgtggtacaggcgaatcaattgaatttcattttgatgcaattaacggaaaaattcctttccccgcttcattctttaaagaaaaacgtgttgctcaggaatgcatgcgtattatcaaagctaagggcgatagtatgaccgattacattaaagatggtgatctggtcggtattgatatttctcaaacagaagtaattgatggtgaaatctatgccgtttattttgctggtgaaggcatgattaaacaaatttttaaagaggcagatggctctttaattttgcatagtttaaatgaaaaatttagggaccgacgtgtcaccgaagagaacgggaaaaactttaaagtcatggggcgtcagttctggagagcaggctaatttagttattaaatatagctaaaataataataagacctttttaatcacttttgtctttttataactttaattatttaactttcttcttgatataaaaaaacctatctcatttaaaagagataggttttttcgctttattaccatgattttatcaacaatatgtatttaaacgataaagttgattaaacccagcatagaagctttttccatcttggtttaactcaatttcttcaccagtttgaagctgaattttctttccaacctcaacccaacgataaccatcaagcgagttttgcttacggacgtgaggaacaatcctcacattaatttcattgccatttacggctgtggcgatttgccactcatttactatattcacaatcattcactcatcactgagctcatgtgatttaacggtatttaattagaacgctagatttaaggtatggacaattcgtctagaatttaatatttagcttgatatagggttatttataagctaattgctttccatgatttcgtatcatgaaaagtagtacatcacagagcataatattttggatgcgggggtcggatttgaaccaacgaccttcgggttatgagcccgacgagctaccagactgctccaccccgcaattggaagtaagctttatacgcttatatattttataaagcaaactttattttttaatcggttgtaattattaagaattatctttttattaatttttctttttatccgttcaaattaaataagccccctcaatttcaattttaacactctaaattgttgtatttattttaaacagaacccgttattcatagacaacaattgccatgcttgggtagcttttatactatctagtctcaacccatcatttatagtttatatgtctgatcctcagctctctcttagtgaatatctcggtacagtgcaagaagtcatacgcctgacttttgacgagcctgtatgggtgagagcggaaattcgtaatttaaatgttaaaggtggacattattatttagagcttgcagaaaaagatgctgacaccgacaaggtcattgcaagctgtaaagcaaccatctggaaattttcagcaagtaaaattgttctcaagtttgaacgtgaaacaggtattgagttagctagtgatttaaacgttttaatcaaaattagagcgcgtttcgatccgcaatatggattttcagtcaatattgaagaaatagactcaagttttacacttggagaaattgcaaaacgttatcaacaaattgtagaacgtttaactcaagaagggttaatacataagaataaacttcttcctactccttttgatattcaaaatgtattagttattgctcctcaaaatgctgcgggtttaggtgactttaaaaaggatgcggatgctcttgagcgaaatggggtttgtcattttgtttatcaaagtgcgacctttcagggaaatacggctgccgtcagtcttatggagtcgttggcaacaggtttaaaacaatgggcaaataattttaactttccacccgacctgattgtaattattcgcgggggtggtgctgtaaatgacttagcttacttaaatgattatgagcttgccgccctcctctgtaaacgtagcgtaccgatttgggttggtatcggacatgaaaaagatcgtactatccttgacgagatcgcacaccgttcgtttgatactccaagtaaagtgattgcgggtattcgcaaccatattgttgaacgtgtacaagaagctgtagacaacctacaaacaatcaaactcttgtcacaacatcaaattacgacctaccaaagtaagagtgatcaatatctacaacatattaaatcctctgcccaagctcagcttaattcagctcaccagttccttgagcagataaaggaacgcattcaatttgtttcacagcaacaagttaaattttctttgtcgcaaactgaatcccttatgcgagaaattctcttgcaaaacccgaaacagattcaagcaaaaggttatgcaattgtaagatcagaaggcaaagcaattcgttccattcaccaaatcacaagctctaccattactgttgatatgcaagatggagcaattaacgctaatattaccgaggtaattccaaatgaatgataaagaactgacttttaaagaaggtcatgacattttaaagcgaaatgccgaattacttgaatctcaggaaagcccggatattgataatttgatgaagattgttgaagaatccattggtgcttataaagcttgcaaatctcgcattgaagcagtccagcaagctttagatgaaacttttaaagaataaatttccataaaaaaagcccatttctacttctcattgaagaaatgggcttagtgaacaccacttagtcctgaaatacaaaaatgtggattaggtcacatttttgcaaaaacatagtcccataaggaccccttggtgttcaagattttaattgtgtctatacgttagtttgcttttattttaagcaacactaaaacagatgaaaaaatcaattttccttcgcctctctataattcatcttcattaaacgggccgactaatttataaatttttccatcttttggattttcatagagtaaatccatattcggtagaataatatcgtcatcaatttcgatatgctctacacttttatacagctctaatttctgatcgttcgcaggtctaacctttgctaaagcaatactttcttggtcaaactgatctttaataacaacttttaatctcttcatgaaaaaactcctgtatattaaattttttaatataaattaatttgttaggtctaaaatgagctaatcgctgaatagccgattggcatggcaaaaaaagttaaaataaatgcagcaatacgttgtaagttacgttgatttaaccaagtgactttatttgagattaatactgtaccaaacataatccataaaaaagcaattggggtaattaaagataaaaagacaacaatgtgaataaaatataaatgaggaacttcccacgctgcatgtggaaaaatcgctgaagcaaaaagtaaagctttcggatttaaaagtgtcgcaagaaataaagcttttggtgtaataagcggtcggtttaaattaatatcttcagacgatgtcatccagagtttaaaagcaagatagagtataaagcccgcactcatcagctttaatatggctggaagccatggaatgaaatgagacaccgattcaagtaaaacaccccatgaggtaattgcgatcaggtaacctattacctctgccggaatcaacttaagagaatgctttacccctgcttgtataccagccgaggctaataatgtatttgttggtcctggagtcaacaaaatagtgactacaagtccaataaataaaaatgacaccataggcaaaaaactctattgattacgctaggcgaaatatgtcaaaaacaatcctgtattgtcgacaaaatcgttgtaacaagaaatattacaaatattttttattttttaaaatcaaattattaataaaaaatgaactcaagcttcactataaattattcaattttaaatttgcaaaatacgtcacataaattttaaaaaaaccaaatttaagttaaaaatagacttaatttatctataaaaatgaagtggttatttttgtatcttttttagacaaattctcacgtttttcatcccacaaaaaagaaaaattacatagcttgaaattatcaaattgatcaatatatatacacatgaaaatcgtgattttactgaatagatgtatcgttcccatcaattcattgatcgccgctttcatcgaattaaatagttgatggaggatgcatgatgaatgcttatgtacgccctcatcccgatggttttaaatcttatttaggaaaggatcagaaaaccggcctctatacagtacgggttggttggacagtatatgaaaccaatgccaatggttcagttttgtatattgttaaagaggaaagtaagattccactggatgtagaaaagtttaaaactgaccgacctaaaatctatgatgcgcttttaaatgaagtgcaatttcaacgcagaaaacaattggctattgatcttcaaaagtccaatattccctcttatgatcgtaaagcctacaaaaagcgccgcggctttacaggttcttaatttaatccacccatagtcaagtcatacagaaaaagtacccgtaggtgcttcttctttatcgaccagttgcaattaatacaaacaaactcagtattaaagtgcttaatgatcgtttgcagtgtacgtggacttcatgctcagctccgtgagcgtactgttcaatgttttccattacgtgtgcccttaaagttcacactaataatttgcctaattttcatacattaaaaaattagccaaaagtattatatccaaacaaattttattttttgtttttaggtatctcttcttaaggttttactgcctttttagaatttagctaacaaaatacctgtaacattcttatacgaggttaatctcgtattgagcatttgtagatctttcatttcaaagtgcccgataggaaaaatgattttataaaatgaaaaaagataacaatattcggttttttaataatagcctttcaaaaggagaatattaaaatgaatagctcacaagaaccaaatcaatctctgtttaatcaagcatccacctctattcaagcctgcattgaatgtatgtttgcttgtaaacattgtgcctctgcatgtttacaagaagagcatgtgcatatgatgcgtgagtgcatcaaacactgcttaacctgtgtagaaacctgtcagttatgcacatctttagaactaagacattccgaacttgctgaacaagccatgcagttatgtgctaatgcatgtcaactatgtgcagctgagtgtagtaaacacgaacatgagcattgccaggtttgtgcaaaagcatgtttagcatgtgctcaagcttgtcaggcatatcgtgcttaatttttagacgtgcttagaaacctacggcctattacgttcgtaggtttttaaactttatagaataaaggattaaatttttagatcagatgagtcattactttttttaggcataaaaaaaacccgcatcttggggaaaatgcaggctcttagatctcccacaacgaccatgagttcattattaagcttgaactttaaaccgttaactaaatgtacccttaataaaaataaattgcaatacagaatagtctgtatatttgaaatattttattatttttacattactttttcttaaatagtttaaaaacataagctatcccacacttagaaataacttttcataggcattaaaaaagcccgtttcacgggcttttctgcaacgttgagcactcaaaaaatgtgtctatccatttttatttgctctttgctagctgtttataaggtcttatcgtatcttttgccctgtcccaagtttccctgtggatcgaggagatattacgattaccttaagtacatttatagcacattatttattcatggctagtgctgttcacttttttttacaaatggataaaatacttcaaaccttcatatttcaagggttttcgacgccatttgggtactggtgagccgtatcacaaattggataccacttcacttgtgaattgacaaatgcatgagagatgactggcgtcgatatttcttcattaatgagccctacccttaaacgcaccacatcaggtttatctaaacgttcactccagacaggtgaaccgcaggttttacagaacactctctttttatttggcgatgcaaaatacgcttgcaaaagattttcaccctgtacaatctctaaatcgcttttttgtacttgagtgatggccgcaaaagcagccccttgtgctttttggcattgcttacagtgacaaaccatgatgggttctaattcggcattaatacggagttgaacaccattacaaagacaagaagctgtataagccatgatttttcctttttatttttataaggtttaacttacgcctacacctttttcaatgtggtctaaaatcgcacacgaagcctgttggtcaccacagcaatcatcagctgaagcctgcaaaatattaaccatttcctgtaaatgagcaattttttgctttaattcggcaatgtgttttacggttaaagctttcacctctacactatgccgatcggtatttttccaaagcgaaataagctctttcatctgttcggatgaaaaacctaattctctggcatgttttaaaaagtttaaagttttaaggtctgtttctgaataaatacgatagccagaagcagaacgctgagctgcttcaagtaaaccgatttcttcatagtagcgaatcattttcgctgaaatgcccgaatgtttggatgcctgaccgatattcatctcacacctcaaatattaaatttggtttaagacctgctgtcatgatcttaaaccaaaagttgattttcagcacgcttactgtactggcgcatgaaaacgttttaagcgtaacgcattgcctaaaacaaagaccgaagaaagtgccatcgcacctgctgcaaacatcggtgaaagtaatacaccaaatgctggatataaggcaccagctgcaattggaataagtgcaacgttatatacaaatgcccagaacaggttttggcgtatgtttcgcatagttgctttacttagcgcaattgcattcggtacgccttttaaactacctgacatcagcaccacatcggcagcttcaatagcaacatctgttcctgtaccaatggctaagcccacgtccgcttgtgccaaggctggtgcgtcgttaataccatcaccaacaaaagctaagcgaccatattgtttttgcagttggcggactgtgtccactttgccctcgggtaaaacctctgccacaacttcatcaatgttcagctttttggcaattgcttgcgccgtatgacggttgtctcctgtaatcatggccactttgagacctaattgatgtaaggcctcaatcgcagcataggttgtttctttaattgggtctgccacggcaataattgctgcaagttgctgatcaatagcaacataaagcggtgttttgccttcttcacctaactgagcagcaatcgcttggaatgagctggtatctaaaccaagttggtgcatataacggtctgcgccaatttgtactttttgaccagaaacttccgcttcaatacctgaacctgtaatcgagttaaatgctgttactggtaataagtttaaaccttcgctttctgctgcttgaacaatcgcaagagcaattggatgttcagacttggcttcgactgaggccactaaagtcagcacttggttacgttcaaaacctgattgcacattaaagtctgtcagtgtcggtttgccttcggtgagcgtacccgttttatcaactgcaaccacttgcgcttcttgtaaaagctgtaaagcttcacctttacggaacaagacacctaactcagccccacgtccagtaccgaccataatagaagttggtgttgcaagccccatcgcacaaggacacgcaataatcagtaccgcaacagcattcaccaagccaaaagtcagcgcaggctctggcccaaaaataaaccaaaccaagaaagtaattgcagcaattagcatgacagccggtacaaaccacatggtgactttatcgaccaacccttgaatcggaagtttagaaccttgggcttgttcaaccatgcgaataatttgtgaaagtacagatgagctacccactgcggttgcccgaatgtttagagtcccgttctgattgaccgtacctccaactacttgttgccctactctcttttcaacaggaacaggctcacccgtaatcatagattcatcaatatagctgtgcccttcaaccacttcaccatcgactggcacacgctcacccggacgaatttctacaatagttccactgaccatttcagcaacagcaacttcaaccacttgaccatcacgttgaatacgggctgtttttggctgcattcccaccaaatgttgaatcgcttgcgaagtacgtcctttagcttttgcttcaaaataacgtccgagtaaaattaaactgacaattacagcagccgcttcaaagtaaacattgaccgtgccttgtggtaatacctgcggcataaaggttgccacgactgagaaactgtaggcagctaaagttccaacagcgaccagcgagttcatatctggcgccaaacgccataaggctggaatccctttttggtaaaaacggcgaccaggaaaaacgagtattaatgtggtcaaaacaaactgtaaaagccagctattgtattgaccaatggtgtgcatgacccacatgtgaaaagctggaatgagatgtgaacccatttccaaaataaacacaggtaaggccaacacaatcgaaatgatcaaatcttttttaagctgatctaactctgaagcttttttatcgagttgctcatcttgatgtttttcagatgctttcgcgtcataacctgcttttttaacagcacgaattaagtcttcaacattgactgaggaatctgtttgtacccaagcctgctctgttgctaggttgacagttgcctcttgaacgccgtctacttttttaagggctttttcaacacgtgcaacacaagatgcacaggtcataccctcaatagacaattctactggtgcagcttttggaacatcataacctgctcgctcaactgctttaaccagtgcttcacgctgaatcggttgatttgaataaacaaccgctttttctgttgccaaattaacgttggcaatctcaatattttcaacttttttaagtgctttttcgacacgacctacacaggaggcacaagtcatgccctcaattgagagtgtttcactatatgctggcaattttgtggtttttgagtccatcaaatacctctgcaaatctgcaaaatttaatattctgtattgagcatacagattcccatcatgggaaggtcaagcatatttttttaaaaatttggtcttgaccttacaatcatgacaaggtttagactcagtgttatccaaacaaacatctcattcttgatggagtatgaatatgaaactacttattgaaaatatgacttgtggtggctgcgcacgtggtgtgactgcaacgattcaagatgtcgatccaaatgcaaaagtagatgtagacttagcgaccaaaatcgtgactgttgaaagcagtgaaagcgtcgataaaattaccgaagcacttgaagaagatggtttcccagcgaaagtgcaataagatataaaattgcatagcttcaacctttgaggctatgcacttcccttatttaaaaatcgataccatttgaatcatctatcgggttctgatcaagtgtaaaaacagttcgttgataaggtatcccttctaaatcataaacctgataaatacagtcgaacaatgattgtaagtcttcacttctgtccattgcccgtgcagtaataaaaattgggctgaccgcgccgttatctaaaatcggaatatagtttaagtgtggaaatcgaatggtatcggcacttgctggaataatgcagattccttctcccgctgccactaagcccaaagccaattgaatttctcgtatctcatgcatatttttgggaaccaaactatgttcggcaaaaatattcaaaagctgggttgagaagttcggtttcggtgaagtgggatacataaacatcttttcatcaatcaaatcggccagatataccccttctgtgcgctgtgcaattggatgactggtatgcgcggcaacgaccaaacgctctttacgtaaaagaattcgcctcacggcgggatcactaattcttaaacgcccaaacccgacatcaatacggccttcttttaaggcctgtaactgttcggttgtacttaattccatgagctgaatattcagatgaggctgctgctgacgaaataaataaatgattcgaggcagcaacccataaagtaaagacccgacaaaaccaatggtcatgcttctttcgatgagaccaatacgcttggtcatactttttatttcttcagcattcgacaaaagtttaacagcgtgctgataaaagaaatgccctgctggtgtggtctgtaaagggcggcttcctcgctcaaagagttgaattccaagctcactttccaaattttggatttgccgactcaaaggcggttgagcaataaataatttttcggctgccttggtgaagctctgttcttctacaacagccacaaaataccgtaaatgtcttagttccatcaggtttccatacctttaagatatattaaaatgcaaattcagtcttagacacagtttaaccattcttttaaggtatatacaagcaataacccgatgaagttatagatcacttgtatagcaccgattgaaatctactggccaacattcgatctatctttatccatgcgcggttaaacacccgacgcgtttatgcgcttcattgacatattaggatatcaagaccttttaaatcgtagcgaaggtcttgatgacttccaccctttggaaagtcggagaacggacatgccacgtattcctgtaatcaataccagccatcttgaccgtattgatgaattacttgtagacaatatcgatacaggtgaatttaaacttcaccgctcagtttttactgatgaagccttatttgacctcgaaatgaaatacatcttcgaaggtaactgggtttacttggcacacgaaagccaaattccaaataataatgactactacacgacttatattggtcgtcagccgattatcattgcccgtaaccgtaacggtgaacttaatgccatgatcaatgcatgttcacaccgcggagcacaactttgccgttacaagcgtggtaacaaagcaacgtatacttgccctttccacggctggacttttaataactcaggtaaattgctcaaagtaaaagacccaactgacgcaggttactctgactgctttaaccaagacggctcacacgaccttaaaaaggtagctcgttttgagagctacaaaggcttcttatttggtagcttaaatcccgatgttccttcgcttgaagaatttttgggtgaaaccaccaaaatcatcgacatgattgttgaccagtctgaacatggtttggaagttttacgtggttcatctacttatacctacgaaggcaactggaaactcactgctgaaaatggtgccgatggttatcacgtttctgctgttcactggaattacgcagcaacaactcaacaccgtaaagaaactcaagctgccgataacatccgcgcgatgagtgcaggttcttggggtaaacaaggcggtggctcgtatggctttgaaaatggtcacatgttgctttggacacaatgggcaaacccagaagaccgtcctaacttcccaaaagcagacgaatacaccgaaaaatacggtgaagcgatgtcgaaatggatgattgagcgttcacgtaatctttgtctgtatccaaacgtttatttgatggatcaattcggttcacaaattcgtgtacttcgtccactttcggtcaatcgaactgaagtcactatttactgtatcgcgcctaaaggtgaagcacctgaagctcgtgcacgccgtatccgtcaatatgaggatttctttaatgcctcaggtatggcaacaccagacgatttagaagagttccgcgcttgtcaggcaggctacgcaggtattgcccttgaatggaatgacatgtgccgtggttcaaaacactggatttatggaccggacgatgcagcaaacgagattggtttaaaacccatgttaagtgggattaaaactgaagatgaaggcctgtatctggcccagcatcaatattggttaaagaccatgaaacacgcgattgctacagagaaagaaattgctgatcagggagaaacagcatgagtactcaagacaaagcaactttagaaaatattgctcagtttctttatcgtgaagctcgctttttagatgatgaacaatgggatgactggcttgaatgctatgcgccagaagcttctttctggatgccagcttgggacgacgacgatagattaactgaagatccgcaatctgaaatttcacttatttattatccagaccgtcaaggtttagaagatcgcgtgttccgtattaaaaccgagcgctcatctgcaaccatgccggacacacgcacaagccacaatattgccaacgttgaagttctcgagcgcgacggagacaaagttactgtgcgctttaactggaataccttaagtttccgttataagacaaattacagctatttcggtatgtcacgttatgtgatcgatttttcaggtgatcaaccaaaaatcttgagcaagtatgtcgttttgaaaaatgactatatcaatcaagtcattgatatctaccacctttaagacatacccctcagctaaacggactgttggctgagggtaaaagtttcaaatattttgtaggatacatgccatgtcaaaccacaatgttgcacttcaatttgaagatggtgttacacgttttattaacgtagctcaaggcgaaaccctatctgacgcagcctatcgccaaaaaattaatattcctttggattgccgtgatggtgcatgtggaacttgccgtgcattttgcgagtccggtagttatgacatgccagaagaaacctatattgaagatgcattaacccctgaagaagctgcgcaaggctatattcttgcttgccaatgtcggccaacttcagatgccgtatttcagattcaagcgtcttcagatgtttgcaaaacagaaattcatagcttccaaggtacattggcccgcgttgaaaacttatcagactcaaccatcacatttgatattcaacttgatgaaggacaaccggatattcatttccttgcaggtcagtatgtgaatgttgcaattccagaaactggcgaaacacgttcatattcatttagctcaaaaccgggcaaccgcttaacgggctttgtggtacgtaacgtaccgaatggcaaaatgagtgaattcttaagcaagaatgccaaaactggcgacaaaatgacttttaccggtccattcggtagcttctatttacgtaatgtagtgcgtccagtgcttatgctggcaggcggtactggtattgccccatttatgtcgatgttacaagtgcttgaagaaaaaggctccgaacaacctgttcgtttagtctttggtgtaaccaatgactttgatttagttgctctagaaaaactcaatgagttgcaggcgaaattcccatggtttgaataccgcactgtagttgcaagccctgagagtaaccatgaacgcaaaggctatgtaacgggtcatattgaaagtgaatggttaaacggtggcgacgtcgatgtttatctatgtggcccagtaccgatggtagaggctgtacgtagttggttagaaactgaaaatattaaaccagcaaacttcttgtttgaaaaattctctgcaaactaacttaaggtggagaaattatctatgtcaaaccgtcaaagatttaccgataaagttgtgattgttacgggtagtgcccaaggtattggccgcggcgtggcattgcaagttgcagctgaaggtggacaagtcgtcatggctgaccgctctgaatatgttgaagaggtactcacagaaattcagcgtacaggtggtgatgctgtcacggttaatgctgacctagaaacctatgcaggtgcacaagcggttgttacaaaagccatcgaacattatggtcgggtagatatcctgattaataacgtaggcggcgcgatctggatgaaaccttttgaagagttttccgaagaagaaatcattaaggaagtgaatcgctcattgtttccaactttatggtgctgccgcgctgtgttgcctgccatgattaagcaacaagcgggcgttattgtaaatgtatcttccattgcaacccgtggtattaaccgtattccctactccgcatctaaaggtggggtaaatgccctaacagcgtctcttgcttttgaacatgctaaagacgggattcgagtcaatgctgttgcgactggtggaaccgaagcgccacctcgcaaagtaccacgcaatgccaacccgttaagtcaaaatgaaaaagactggatgcaacaagtagttgatcaaacaaaagatcgaacattcatgggtcgttatggcacaattcaagaacaagtcaatgcaattttatttcttgcatcagatgaagcatcgtatataacgggatcggtcattccggtcggaggtggagatcagggttaaccctgatctttttatatatttggataaataacatgaattgcatggaggcaatcacacatggcaaccctgttcaagacattaaaaaatgactggtccatatcagcaacagttgcgggctttcttgcagttttaatttcttactcaggcccactgattatttttttccaagctgctcagcgtgcccatgtatccaccgatatgatggtgtcatggatttggggaatttcaattggcgctgccgtttcaggtatttatctttcgattaaatataagactcctgtgattaccgcgtggtctgcaccgggtactgccctgttagttaccctatttccaaacatctcattgaatgaagcagtagccgcctatattacttctgccatcgttattttcttaattggcattacaggttatttcgacaaattactgaagtggattccacaagatgttgctgcgggcatgatggcaggtattctttttcagtttggtattagcctatttaccgcatctgatagcatgcctttgattgtctttagtatgctcattgtctttttaattgccaaacgtttaatgcctcgctacaccatgatttgggtgttagctgctggagttttattaagcctcattttaggcaaaatgaatccggttgatgtgaattttaatttagcaatcccccagtggattagcccggaatggacttggaactcaacactcaacctcgccgttcctcttattttagtcagtctaaccggccaatttttaccgggtatggcgattatgaaactgagcggttatgacacgccagccaaacccattattacggcgaccagtattgcctcgttagccgttgcctgtgtcggtggtattaccattgtacttgcctcgattaccgcggctttatgtatgggtaaagatgcacatgaacttaaagaaaaacgatatattgcagggattgccaacggaattttttatattttaggtggcttatttgctggcagtattgtcatgctatttagcttacttcctaaagagttggtggcagcactggccggtttagccttgcttggtgcaattgccaccaatatttctgttgccatgaaaaatgatggtcaacgtgatgctgcacttattacctttttagctagcgcatcaggtatgcattttcttggattaagctcagtgttttggggtatttgtattggtgtaatcgcccatttcattcttaccccacgctcaactccagccacaaattaattttttatctaagtgcccaccactaaaataaagcttcaaacgccaaatcaggatataaataattcgctatccctgatttggcaatttttatttaatataaattaaatttcatttttaagatgagtttctaaaataattgactttaatattttttatttatttccactttaattcctaatataaatttagctatatttctagctgttattctcagcaataaaatgtataaaagatttctataaaatccttaaaattctcacaatacaatatttaaccctatttcaaacataacagaagcaacaaccaaattattaaaataaaccatatttttcaataacttattttaataaaaatacaataccttaaagacataaagatatatcaattaggtttttgactctattccaataacaaaatagtttattaaaaaataacgcgatgcttcacaaattggaggtgaagaaaatggacacaagcaaggttaatattaatgagttaattgataaagcccgttttacatcttttcattggaaagttttaatctggtgcttacttattattatttttgatggatatgatttagttatttatggggttgctcttcctctgttaatgcagcaatggtcgttaactgctgttgaagctggtttactcgccagtgccgctctattcggcatgatgtttggtgccatgattttcggcacactttcagacaaacttggacgtaaaaaaaccatcctgatttgtgtcaccttatttagcggatttacctttataggtgcctttgccaaaggaccaactgagtttgctattttgcgctttattgcaggtcttgggattggtggcgttatgccaaacgttgtggcacttatgaccgaatatgcacctaaaaaaatccgcagtacattgatcgcaattatgtttagtggctatgcaattggtggcatgacatctgcgctactcggtgcatggctcgtaaaagatatgggctggcaaatcatgtttttaattgctggtattcccttgttactgctcccgctcatttggaaatttttaccagagtctctcgcctttttagtgaaatctaatcatagcgaacaggcaaaaaatatagtgagtaaaattgcgcctcaaactcaagtcaatgccaatactcaactggtgttaaatgaaagtacaacaacagatgcacctgtccgtgcgcttttccaacaaggccgtaccttcagcacgtttatgttctggattgctttctttatgtgcttactcatggtgtatgccttaggaagctggttgcctaaactcatgctgcaagcgggctattcgttaggtgcgagcatgttgttcctctttgcactcaatattggcggtatggtcggtgcaattggtggtggtgctttagcagacagattccatttaaaacctgtcattaccattatgtttattgtgggatcggcagctttaattctgcttggcattaatagtccacaatttattttatatagcctgattgcgattgccggcgctgccacaattggctcacaaatcttactctacacgtttgttgcgcagttctatccgacggcacttcgttcaactggcatgggctgggcatcgggtattggccgtataggcgcgattatcggaccagttttaacaggtgctttgctttcatttgagcttcctcaccaaatgaatttcttggcgattgcaattccgggtgtagttgctgcacttgcaatatttatggtcaatctaaaagcctctgttgctgcacaaacgccatcaacttttaaccctcaaaacacgcttacccagcagtaaacataaatgcgccgaggactggcgcatctttttggaaatggattatggaattcgtacaccgttttaaaccatgtaatttagcaataactacattattcggtttattaactagctcaagtttatgggcagcagacaccactcaacaaagcgaagatgaatggaagttcacgctaaaaaatgcctatatcaatcgtgattttgataatgatgcactcaaagacacaggcagttggtctcaggcagcctcattattttataagtcgaaaatgcatgatactccgttaatcatagcagacaagcctattaccattggagctgatgcttctgttcaatacgccgtacgcttgagttcagacaaacatgtcgcagatacagttttgccttttaataaagaaacgcaatctcaagcatctgattatctaaaatacggcgcaactttaaaactaggctacgacaaaacccttttaagtgtgggtgaactctggttggatttacctgtaacagctgtcgatgctagccgacaattgcttgcctcttattggggaaccaaccttaaatcgcaactttcagatcagctttatgccgaaattggtcgggttgaaaaagtttcgccacgcaatgaagaggactttaaaaagttttcctttacggcaaatgggattactaaagaatccgatggcctgaactacattgacctacgttatcaatttacgccgtcactcaagggtgaatattactttggtaacttagaagacctctacaataaacactatgtagggcttgagcataattggaaacaacctaattttgccctcacctctaagtttaaatacttcaatgcaaaagatgatggcaatacttttgatattgatgcgcaaaacatcggggtgctagaaacacttaaagtaaaaaatcatacctttggtttggggtaccagcagattatcggtgagtcggcttatccattaccggatggttttttaccagaaacttatttcattaactggaatgccactggcttctttaaagaagacgaaaggtcttatcatgtgatgtacggctacgactttaaagactatgtgcctggcctaaatgcaatggtgaaatatgtttacggtcatgactttaaagcagccaatggcgagaaaaaccacgaaaccgagtcgaatgtgattttaaactatgcgtttcagcagccattgttaaaaggctttgccctgcaatatattcgaattgattacaacgtaaaacatggcaatgactttggtgaagatcgcttgtttgtaaactacactaaaaagttttaattatttttgattcaactaaagcgggctaattttggctcgctttattatttttgtgccataaaaaaacgctcttacgagcgtttttaattaatctagtaacttaagcaacatgcttttgtacaacaatcgaacctactgaatagccagcgccaaaagatgaaatcacgccatattcgccatcatccacttcgtggcctgtacggtgtaaagcaataattacacctgctgaagaggtattggcaaactcatctagaataattggtgcacggcttagatctgcatctttaccagccacatatttcaagattaattcattcatgttggcattggcttggtgtaaccagaaacgcttaatatcgtttgcagttaactgcattttttccaattgcgcattaatgatttttgccaccaacggacaaacatctttaaatactttgcggccatcttgacggaataacttgtcgtcaaccactgcatcttcgctacggtttaagaaaccgaagttattgcgaatgttgtttgaaaattgagtgaataaatgaatatctaaaatttcaaaaccagttttagtagtggtttcttcaataatagaagcggtcgccacatcaccaaaaatgaagtgacaatcacggttacggtagtctaagtgaccagatgtaatctcaacattcactaataaaacacggcgagcacctgaacgaattgcatctgccgcttgtttcaaaccaaaagtagcagctgaacacgcaacgttcatgtcgtaagcataaccttgaataccaagtgccgactggatttcaattgccacagccggataagcacgttgcatgtttgaacaagccaaaattacaacatcgatatcttcagcagttacacctgcattttccattgcctgttttgcagcaataacgccccactctgcttgaattgaaagttcatcatttgaacgttcagacaaacgcggacgtaaacgtgttggatcaagaatacccgatttttcaatcacgtaacggcgcttaataccagaagctttttcaataaattcagcacttgaaccacgtaattcttctagttcgcctgctgcaattttctctgcattctcttggttatattgttccacataagcatttaaactgtcggccagttcttcattagaaatgatttctgttgggtgaaatagcccagtacctgtgatacgaatgcccatgtaaaactcctaaaaaaatgaatagggtctgttaatctttcatttataaattgcgttgccagctaaaaacaacataaacagaccccgatctattttaactgattcccaaacgatcccataacttttgtagtcgagttggcgaaataggcatcttggttttcatcggctgagaaaataaagaaatacgtaattcttccagcatcaagtacaattctttgattcttggatcatttttgaacttaaataccttgtccatccatggatcgacatcgtcaatagcagcatgatctcgctgtagattatttggcaatcgatctaaacgcaatagcagcgcttttaaataacgtggatattcctgccaaagatcaactggctggcaatagacaaaattgccgagtgacattaaatcgagttgatcttcaatatcatcgatactgcgtccaaatacgtccggatcaagtactaaaagttgacgacggatttgttgccactgaatataaatatcacttaattgctcaagtgcttgctgcccatagctcaaaaattgttttttgacctgttctagcagttgattaaattcatcagcattgattggcaaagtcgtaattgccatttgtaaagtcgcgtataccagcatttgctcaagtttagctttatcgcctaaaggtgaataagccaacgcaagaggtttcgaaatctgctttttcaactgacgaaccaaatcgccaagttgcatatggaccagacgaataataccttctcgatgctgtttaatcgcctctgcctgatcgttaaatgtttgtataaccacgccagactcatctttcgcctcaagttcggcaaaatttttagttggcactaaagcttgatattgtttaacaacaacccctgtcaccttctgtgaagcttcaaaggtaaagttttcagggaaggttttaaattcacctttttgctgtttcaccggacgatgcgtttctacgcgacaacgagccttcaactcagccaagtcacggcctttggcgatcaatttacctttttcatcaatcaccttaataaaaggcaccaaatacggatctatgcgttcaaatgaaaaatctttttccgtaatctgctcaccacgtaaagcaaacgccagatagctaaagatatgttgtcgcaaatgtacagcatcaataccttgcatgagcttacgcgccgtatctggaattggtacgaggttacgacgtttatcttttggtaaggctttcaataaggcttcaatgagatctaaacgccagcctggaatcccccacgaccaaatattttcatctacctgaggcaatgcctgtaccggaatttggaccgttgcgccatcttcatcatgacttgggtcaaagcgataagtagttgccaagcgtaactgaccattatgtaaatgatcagggaattgctgcgtggtcggacggtcattgagccaaagcgcatcatcttccacgtataaataacgcggattttttgcttctacggttgcacgccagtcttcaaaactacgacgactcgcaatttcttcaggaattttcgacgcatagaactgataaatcgtttcttcatcgaccaccaaatcgcggcgacgtaatttatcttcaactcgctctacttcttcaagtttaagcaagttgtgttttaaaaatggtggaactgtacccagatttcctgtggttaatgcatcacgtaagaaaatctcatgtgcagcaggttgatcaactttttcaaaattaaccaaacgcttcggttcaataattaaaccaaacaatgaaatttgtgcataagcatttacaataccggcttttttagaccaatgcggttcgaaatagtgatatttcaataagtcgcgtgcagcaagcaaaatccattcaggatcaatttttgctaatgtacgtaaatagacttgagaggtttccaccatctcaaaagccatcacccacgcagtattggttttatgcaaagtactggccggaaaaactttagccttttgctgacgcaccgccataaaggtattacgttcatcagttttattggcaatgaacgataataaaccggtcagcaacgcacggtgcaagttttcataatttgcaggcttttcattaaaactaagttttaaaccttcggccagctcaactaactgctggtgtgtctgtttccattcacgtaaccgtaaccaacttaagaaatgctgcttagcaaattgacggcgcttgttttccgacattcctgcttcgcctttaggatttaaagtatcccaaagttttaaataaaacagaaaatctgaatctgcctctttgaatagtgcatgcttttgatcagcttgcatttgtttatctgctggacgttcacgcgggtcttgaactgcgagtgcactcaccaccaccaaaatttctttgagtacaccaaaatgagcaccacccacaatcatacgtgcgagtcttggatcaatcggcatacgtgccatcatttggccgactttggtcagttcgtttttcttctcgttcagcgcgcctaactcaatgagcaacttacgaccatcattgactagacggaaatctggcggctcaatgaaatcaaagttttccagctcacctaaacctaagctctgcatttgcagaataaccgatgccaaattggttcgcttaatttcaggttcggtaaactcaggacgacttaaaaagtcttcttcgctatataaacgaatacacacacctggagcaacacgaccacaacgccctttacgttgatttgctgcagcttgtgaaattgcctcaatcggtaagcgttgcacgcgtgaacggtagttataacgagatatacgtgcaaagccgctatcaatcacgtagcgaatattaggaacagtcagtgcagtttctgcaacgttcgtcgcaataataatacggcggccctttccacttgggctaaaaatcttttgttgctcagaaacggctaagcgtgcatacaaaggtaaaatttcggtatgtctcggcccgtacttttgtaaggtttcctgcaattctcgaatttcttgctctgtacttgagaaaatcagaatatctgcatgttctggatggcctttttcttcggcatcagcaaagcattcctctacagcttgtacgactgcacgcggcaggttttcttcaaagtcatcgaactcgtcgtcatcactaccaccaatattcatttctgaaattgggcgataacgcacttcaaccggataactacgcccttctacttcaaaaattggtgcattattaaagtagttactaaaacgatttacatctaaagttgccgaagtcacgatgacttttaaatctgggcgttttggcagtaactgctttaaataacccataataaaatcgatattgagtgagcgctcatgcgcttcatcaataatgatggtgtcatatttagacaagaagcggtcatttcctaactcggcaagcaaaataccgtcggtcattaaccggacaatcgaatcttgcgagccttgttcattaaaacggattttaaaaccaattgactcgccgagcttttcgccgacttcttctgcaatacgctgcgacacactacgtgcagctaaacgacgtggctgggtatgaccaatcataccagtcaagccacgccctgctaacattgcaatttgagggagctgagtagttttccctgaacctgtttcaccagccacaataatgacctgatgcttttgaatcgcttctattaaacggtcagcatattgggttacaggaagatcctgatttaatttgatttttggtaagcgttcaaaacgctgtctaacttttgcattagactgttcaaataatttttcaatctctgcagtattggcttttttatctttacgtaaacgatttaaacggtaacgatctctcgccatcacccattgatctatatttaaaccattcagcacagataagttttcctgaaaattcaacaatcctctattttacgccttaatgaccataaggtaaaacaattggttttttatatatttttaatttttttacatttcacccttgaatttttagtaggtaagcttcatgttgttaggcaagtttcttttactataactgtcatttgatttacatgtttttgcagtcaaatcgaatacagtatttggggacttaaaaatcgaaaatttcatacttattcaattttccgattttagtcatgtaaaaatactatttccccaataaagaatttttatttattctacatctcgtaaacaagtttaaatataaacctcaatcatggagacaatgatgagcttgattaatactgaagttaaacctttccaagcaactgcttaccacaacggccaattcatcgaagtgaacgaaactaaccttaaaggtaagtggtctgttgtattcttctatcctgctgacttcactttcgtatgtcctactgagcttgaagacttagctgataactacgctgaattccaaaaattaggcgtggaaatctacggtgtttctactgacactcacttcactcacaaagcttggcacgacacttcagacgcgatcaagaaaatccaatacccattaatcggcgatccaacttggactctttctaaaaactttgacgttttaatcgagtctgaaggtttagctgaccgtggtactttcgttatcgatccagaaggtaaaatccaaatcgttgaaatcaacgctggcggtatcggtcgtgacgcatctgaacttcttcgtaaagtaaaagctgctcaatacgtacactctcacccaggtgaagtttgcccagctaaatggaaagaaggcgaagcaactcttgctccatctatcgacctagttggtaaaatctaatctctcttagattttagaaacctaaagaaccatcctttatcggatggttcttttgttttgaataagcacatcacattttctactgatacttttacaattctgcccttccccgttacctaaacattgagtaatgtcaaataaacaactggttaatttttgagtacgtttgatatgaaataaaggggtgcatttatggcgaatacagcggtcgtcacttcatggaaatacaatgcgacatcgcgtcatttaaaaattttttatagcgatggctcaggagatctctatcatcctgttcctgagtttgtttatgacaacttattgcgttcaaccgataaagccgcttttgtacacaaatacttagaatttaatttgcactttacccgactctctttggtgattgcctcataaaattataaaaaaggcctgttcaaaacaggccccaactggaatatgaaaaattatttcagcataactattttgtgaccactaaacacaaacctgcgccgacagacaaaatgctactcatgtaatccggatcttttttaattaaggctataaatcgatttacttctgccgcatgagatatcacattatcaacgactaaaaccccacctttaggcttcattaggcgttttaaatctggccaataattttcatatgcatcacgttcagcatctaacaaaataaaatcaaatttttcctgagctgcttttaagtaatcggctgcatctcctacccaaaattgaacaatttcactgagctctaactcagctacatgacgttttgcctctgcacttcgctttgcatcaatttcaactgtaatgacttgcccaccagtcgcttgggcagcttcggcaagccacaaagttgaatatcctgttgaagtgccaatttccaaaatagacttggcttgctgcatacgaataagctgggaaattaactgggcagattctacttctatattacgatatcgttgtaaacgatcggattgctgtgagtcatgctgtttaaaggtgtcatataaatcagcaactctttgtaagaaaatagtatttggcatctattttactccttctttatatgacagccgttttatttaagtactttgtattaatttaaaacgcggtacgacgctaccatcactcatttgcacggtttcagtaaacatatcaagtggtcgaacccaagttgaataatcaccatataaacattgataaacgaccaattcctcttcagtttcactgtgttttgctacagaaaaaacttgatagagattacctttataatgctgataaataccgcgttgcaatgacatgaaagtaccttttaatgttatgacataaaatctttacagccatataacatatataaattttcaaacactttcactttaaaatactgcaaaactaaaaatgaaattaagatgctcttttgtactttcttaacttacgcgttgttgcaaatcaacattcaaaaaaacgattaaattcataaaaacatactgttttacctattcattgttttaacgtactatgcatctattgaaaaaatttggatgcattggagtaaaaaacagatgttagatcaaaacattaaaactcaattaaaagcttacctagaacgtttagaaagtccaatcgaattagttgctgctttagatgaatcagacaaagctgctcaaattaaagaattagtaactgaaatcgctgagctttctgacaaggtaacagcccgttttgacggtaacaatacacatcgtccaagctttggtgtggctaaagcaggtgaacagcctcgtgtgttctttgcaggcttaccaatgggccatgagtttacgtctttgatcttggctttgttacaagtgtctggctatgcacctaaagtgtcggatgaagttttaaatcagattaaaggcttaaacctcaaagctaactttgatgtatttgtatcactcagctgtcataactgtccggacgtggtacaggcgcttaacctgattgccatttataacccgaacaccacggcaaccatgattgatggtgcattcttccaagacgaagtggaacaacgcaaaatcatggctgtaccgatggtattccaggacaatgaacacattggtcaaggtcgtatgacgcttgaagagattgtggcaaaacttgataccaattcagctgaaaaagacgcagcagcactcaatgccaaagatgcgtttgatgtattggtgattggtggtggacctgcgggtgcaacagctgcaatctatgcggcacgtaaaggcattaacacaggtatcgtggctgaacgctttggtggtcaggtcatggataccatggacattgaaaacttcacttctgtgcaaaaaacacaaggtcctaagtttgctgctgaaatggaagcacatgttcgtgaatacgatgtggatatcatgaacctgcaacgtgtcagcaaaatcactggtgcagaccaaacagcaaatggcttggttgaagttgaacttgaaaacggtgcaaaacttgaatcgaaaactgtgatcctttcaacaggggcacgttggagagaaatgaatgtacccggtgaagctgaataccgtacccgtggtgtagcgtactgtccacactgtgatggtccattgttcaaaggcaaacgtgttgccgtgattggtggcggtaactcaggtgttgaagcggcgattgaccttgcaggtattgttgagcatgtaactctggttgagtttgacactaaacttcgtgctgaccaagtcttgcaaaacaagttaaacagcttgccaaacaccactgtgattatgaatgcattaagcacagaagtattgggtgacggttcacaagtaaccggtcttaaatataaagaccgtgcaactgatggagagcatgtggtagagcttgcagggatctttgtacagattggtttacttccaaacactgacttcttaaaagacagtgaggttgagttaaccaatcgtggagagatcattgtcaatgaccgcaacgaaaccaatgtaaaaggtgtatttgctgcaggtgactgtaccactgtaccttacaagcagatcattattgctacaggtgaaggcgctaaagcatcactctctgcgtttgattacatcattcgttctgggcagtagaactggtcaaatcactatcatttaattcaagcctagcattacaaaatgctaggcttttttaatacgagagttacaactttttaacaatttttgatctttattaatcagttactttatgtttatattttagacatccataattttggatgccatgaattagaaggaaaaacacaatgaataaattacttgttgctttaggtcttgctgcgactgttgcccttgttggttgtaataaagataaagctccagaaactggtgctactacaggtgaacacttagaaaatgctgctcaacaagcaagtgctgatatcaaatctgctggtgatcaagctgcgagcgatattgcaactgcaacagacaacgcttcagctaaaattgatgctgctgctgaccacgctgctgatgcgactgctaaagctgcagctgaaacagaagctactgcacgtaaggcaactgctgatacagctcaagctgttgaaaatgcagctgctgatgtgaaaaaagatgctcaacactaattcgctttagcattaaaaaagcccctattgcttaggggcttttttaatgcttttgaaaattgcttatgaaattaaaccttcatcacgcattgcaatttgtacagactgacgttctgcaactttattacgtaaggcaataatatgtttatatggcgttaaatcatgctcaattgagtttgaccaatttgttaaaacaaataaatacgcatctgctggaccaaaattatcatttaccaaatagtcataatccgactcagccaaataattatcgatatattttaaaagacggtcgatttcagcataagcttttgttttttcatcatttgttaacggcgccccaaaaaataccgcgtatgcatcatgcaattcagaatttaaatagcccaaccattctaatactttcgcacggcctaagcccgaaggaggaatcaaatcttgtttagggtcgtgctgagcaaggaaaggtaaaatcgctacgttttcagttaaaattaagcccggattaatttctaaagctggtacatatccctttgggttaatttcataataatctgcacctttttctgttttatgtgtttttaaatttactcgttctaaatcaaaatcaacattaatttcatttaaaataatatgtgcagctaaagaacatgcgcctggcgaataatataatttcatatctgatccttgttatttcacattaacgttttaaattggttctaaaaaacctgcaaggtttgtacaattccttaattgtaaaaaagcgtaaatttataaattacttacactacctaatattcttgaaaaagttttcccttgcaagttgtcttgcgtgacgattgtttaaaatatgataaaacacattcacatcacgcatttttaccgttaactacgtttaaaaagctggctaatccattccattaattgagataagaaatcgaaaattggacttttctggttatcatttggctgattcgagtctttgccatttaaatctaggtcgacaatcacagggtcatggtccgaagaacgataggcatcttcactatagaacaaagctttttgctcatcagtcttatattcttcgttgtaatctagaaccgtcggctcgtcagcattaatatgccaagcaaaagtacgaactacttttggatataaatctgcatcagcaatagcatggtctaagttacccgctccaccattaccatttgcatcgcttgccacaccaaaaacataactgtacgcctgagcgccttgcccaactttagcgtcattgagtaagactttataattggctttttcaaatgccaaaatcggcgcctcttttgcataactattcatgtctccaacgagtaaagcattttgcttaggcacttgcgtcggattttttgctagccactgtacaatttgatcaacagcttttacacgggttggattccagcatccctgaccatcattttgatctgcattagaagagttggcatctactccactacatccttttgatttcaaatggtttggaataacagtaaatgttttattaccacgaacagcttggaaagtttgagctaaggttgttcggtttttatcacctaaatcaagcacaacagctttatttaaagacttcacacgcttgctgttataaataatcgcaacagcaataacatcattacctaaacgatccagattttcaggaataacatatttccagtctggacctagtgcactggttaaatgagcaattgcgctgtttgggccatagccattgttggcaatttccattaaaccgtaaacgtcagcatcaatcgatttgagtgcactcacaattttacggtgctgtttatcaaactctgcttgtgtgtttgcaccacgctctgttgggaaacctgttgcaccattgtcatagttcaagacgttaaatgaagctacacgaatatgattggcatttttcgtaataatattttgacgcgggttggtttgagcaataacttctggttgcgtacgtccaagcactggttgtacgcgccaaccgttaaaacgatattctaaaatcccttcgacatttttaagctggtagcctgaacgcaatgtattggcagcactaaaatttgtaggtaaccatggtgtacggttttgattgttataaccatcatcaaaaataattttagataataaatttttctgagctagagctttagcttcaggagatagcgctggatataaattggttggaatatataagcgacctaaacttaaagatagttcaccataacggccataattataattctcactcaccgttaaagtctgaggcaatttcaccaacatgccttgataacgctgcggagaatgggttgaaccgcctgttaagctcgaaaatggtagttcaaggctaattggctgaacctgatttgccatattgctattacaggtttgaatatcttgttgtaattggtcaatctgtagctgattttgatagctggttaaacggccacgtaaaataacctcatcaccaatttgtccacctttcaccgtactactattcggaatataaacaaaaatggcattgctcacatttgcacgtgctttcgtatcaggtgtttgaacataaaaacctgagaaaccatttgcataacgatagtcggcagtaattaccccacgcacggtataagtctggttttgtgctgatgttgctaaatcggcaattggtgtatctgagcttgaacagctgaccgtttcaataggaggctgagtagtagtacctgatagatttgtaaaatcatttcggtttgcccatgctgtccatgaatggtccaaatcaaatgccgctgtcggatcaatactcaaagctggattttcagtttcaatacgtttaaagctatttcccaagcttgaaacagcagttccccatcctgcctcaggtcgttccccaatacggccaaaacgatctacaggtgtgcctttataaacaagcacaactgcatcatccccattaaaagacaatgcagccacttgatgtactttattgccaagttctgtctgtaactctgaacgccccaccaaaaatttttgtttacttgcaagtgtaccttgtaaacggaaagtggctgttttcgcagtcccaccattattaaattgttgaatttcataatcggccaagttaacagtagtaccatccgggttataaatttctaacccttttttattattgctaccatcaacatactggctaaacatgagctgtgcttgagcaacagaactatatgaaaatgcacctaatgcacttaaaaaaaccgaaagtgtttttaattgaaaagttttcatgagtaaaaatgttcatgtgagttttaattagcctcttagattaaatattgatcatgacatctacatgaagaaaaacaccgaaaaatttgacttgaccacctgaagacttaaaataccgcatttgaatttcaatattgccaaggttatgtcgatcgatcagttagaaacgcaaattgcagaattggacaatttgcctgaacaccgtgaaattgtgacgtttatgcgtcgttcagccccactcaatacgtctcaacgcacggctttagaacaacatcgcgatttaattttggaatatcccgtgggtgacttacgtcagcacttcgagcatccagagcgccctttaactgttgaaattggtttcggtatgggccgttctttagtgcttatggctaaagcgaaccctgaacgtaactatgtgggtattgaagtccatgtaccgggcattgctcaatgtgtctatgaagcaggtatggcagagcttaaaaatttacgtgtactcgatgctgacgcaattcaagttttacgtgaaatgcctgacaacagtatcaactgcgtacaactttacttcccagacccttggcaaaagaaacgtcatttcaaacgccgttttgttattcatgagcgtatgcaactggtcgaacaaaaacttgagcttggtggtacgttccacgcagcaacagattgggaaccgtatgctgagtggatgttggatgtactagacaaccgtccagaccttgaaaacttggctggtaaaggcaacagttatcctcgaccagaatggcgcccagtgactaagtttgaacgccgtggtattgagtcaggtcataagattaatgattttatctttaagaagattaagtaagaaacagggcttagtaacaaactaggcccttttcatttcaatattaaaaattaaataaacctataacttatcttgtccatttttctggctaattaaagattgccaattgaactcaatctcgttatttatagaaaaggtacttgccatactaaaaatactaaggacaacacatgttaaaaatcttagggcgtgataattctattaatgttcgcaaagtcttatggctatgtgacgaattaaatcttacatatgagagagaagattggggaataggtttccgctccgctcaatctcctgaatttttgcaattaaatccaaatggtcaaattccagtaatcttagatggtgacttagtcctttggcagtcgaatagcattatacgttatctggcaaatgcttatgataaagaccatatactctacccaactcaagctaaacaaagagctattattgaccagtgggttgattggcaagctatagaactgaataacagctggacttatgcatttatgtcgctcattcgacattcagcccttcatcaagacccgaatttgttacaacaaggtattgatcagtggaataaacaaatgcagattctcgatcaacaacttgcaaaaactcaagcctatcttgcaggtactgagtttactctagctgatataccaattgggctgtctgtgcaacgctggaaagccactccttttgaccatccagcgcttaaacatgtcgaccagtattttgaacgtttaaatcagcgtaaaggctttttaaaatggggcaataacggtcaaccttaatctcttaaaattaagatgagtgatggcgctttacgatgccatcacttaaaagttgataaacctgttttaaatcatctcgatttgcttgggctaataagctttgatgcattaccaagatattctgatctccccgcattgcaggtcctgtttgcatttgctttggatcattttcagtagctttttttgctgtttccagaattaatgggtaaagcaagccaaagtcgacctgctctgcatctacaacttgctttgccatatcaaaacaataattactaaaattacaggcaaacacggctgccaaatgcaaagttaaacgttgtttggaggtatattgatatacacgcttacttaggctatttgctaaatcagaaagtatgactaaatcgtctttattggtcgcctctacaaataatggtgtggcttgccaatcaacgtctctttcaagactgaacgtttgcaaaggataaaacacccctgctttttcatgaatattactgatgacttgaatgtctgtgctacccgaggtatggaccataagcgtttctgggaatatctcatgtacctgcgttgcaagttcagtaatagcactgtctgaaacagctagaataattaaatcgcttggttgaaactcttgaagagactgacatgctttcgcttgaatttgctctgcaaacttcttggttttctcaaaatcacgtgcatagacttgtgcgatgtgatgaccttgagccaacagtgcctttgccaaatggaaggcaacacgcccactccctaacaaactaattttcatgccaacctaacaatatttatttctataaaaaaagcttctcaaaatgagaagcttttttcaaattagaattcaataaaatctgttttttattgagctactgaaaactcaatacgacggtttttaaagcgtccttcttcagtcgtattgtctgcaactggctgttctgaaccatggcctttagcaaccagtttagaagcatccactcctttagaaactaaataatctactactgcttgagcacgtcgttgagaaagcgctttattagcagcggcattccctgttgagtcggtgtgaccacctacatctaatttaacaccagacactttatttaaaagggttgctgcttgatcaagaatagctttgttatctgcaggtatgtcacttgagccactcgcaaagttaataatttgtaaattaagtgctttaactagtgcgtttacatctacattgttcgggtcaattgcagttaaggctgtttgtgaagcacttaaactattgcttacagactgttcagctgtttctggcgctgcggcaacaacttcggtatgtggaacaagtgcttttactttagcagttaacgcttctaacgctgcagcatcacctgctttcaatgtaatcttgtcacccacccattctaaagaagcgtctggaataccttttaatgcacccaacacgcctgctaaagcatccttatcggtaaaagcagccgcataagtttgacttgtatcaacatcacaatctttagtagctgaaaagacttgtttaacttgagtttgtaaagtcgccaagaaaccttgatcgccaattccagcctgacactggctcacagcacctttatcatcggtgcttaaagttaaagtagctggagcagccgcggcctctacaccgcttgcagctttagtttcaggtgcaggtgtagcttctttatgctggcaagagcgccacaaccaagcaattaataacccaagaataatgagcgcaataatgggtaaaaaaccacgagatttgcccgtagtctctgttgctgctgcaagtggcggtgctgtcgatgaagttacagaagataaaccagctccaatacctaatggagctaataagcccacggcccatcctggtaaatatgaacggatcgtttcagcatgctgacgtaaatagttcacaatactttgttgatcatttccggcaacgtcagaaattgcattaaggctcggttttaatgcgctattgagggtattttcgatttcattatttggtgctgtaccgcttaaatgggtaagcacagtattcttaatttgctcattatgagaaaaaagatcggataatgacggagccaaactgtttttcaattgtcctataagatcaggtttagcagctaataatgaaagtagaattggataaaacttagataaagcgtttgttttttcgccgaggtatccatcctgattatttaatattgttgaagatactttttctttaagcagttctatagggtttatcgacattggttattctcccgaatcttatacgtcgtaaccagcaactttttgattattcaaatacttctctttgctgatagttttttattctaatgcgctcgaaatcttttgttgttttttaaataatttatatacaattttccatctagtatttacaaaacaggtagatctttatgatctacctgtttatattttatatcggcattttgctgcttaaaattaaacagcaaaagtctgtaagactttacctgtaagcttttgacccagtaaaggggtgtttttcccttgagataaaatagtgtctttacttacagtccagcttaactcaggatctaccaacacccaccctgcttcagcttgccaacgtgctgtcatatttgctacctgtgcaggagcacttgtcactttagttacccattctaaaggttcaaataaaccttcattaatgagctgaatacccaaagccacataagtatcaaatgcagtaatacccggttgggtctctgcaaatggagccattttagctgaactgcttaaaggctcatggtgggtacagattgcatcaattacaccttgttttaaaccttggcgtaaaagctctttatcttgctcagaacgtaatggtggacgaacatgtgcaagtgaattgaagccatcaattagttgctcagttaaatgtaactgatgcattgctacatcggcagtaaccggtaaaccttttgcttttgcagcacgaattaattcgaccgaagcgccacaagacaacaaaccaaagtgagctttgacacctgtcgcttcaatcataagcagatattttgcaatcgctacggtttctgcaattgcaggaatcattggtaaaccttgacgtgatgcaataaagccttcatgagcacaaccatctttagcaagttgtggctcttcagcatagaaaacgacggttaaaccaagacccgcggcgtactctaatgtacgaacaacaacatcgtcattttcaaaagcagcattcgcatttgaaacagcagtacagccaccctttttaaggcctgccatatttgctggttgcttaccatttagaccttgagtctgggcaccgatgatatgcatgtgaataccaccatcatgccaagctttttcaattaagccgtgaatgagcgcaccgttgtcttgtacaatcggctttgagtctggcggcgtaatgacgtgcaaaataccattagcacgtgcagctttaccttctgatttcaacgttccatgctgctgctgacctggttcacgcaaacgtgcacacaaatcaaccatagttggcattaaccatttaccctgaccatcaatagtttgttcaacctgatcgactggggcaatgagcttaccatcttgaagatatacagtttgtacgctgtctgttttttggattgggtctaacacacgtacattttcaatttttacaatactcatgtgatccattccttacaacgcaatcgcttcaattaaaccttgttcttggagttgcccttgcatagacaacgctagcacagccatacgaactgcaataccgttagtgacctgttttaaaatcactgactgttcgccatcagcaatactcgaatcaatttctacaccacggttcattggtcccggatgcataacaatacagtccggtttagccaagctaaggcgctctttgtttaaaccgtacattctgtaaaattcagattgtgaagataatgctggtgaatcgatacgttcattttgaatacgtaaagcaataatcacatcacaaccggtaatgccttcatccatgttattgaacaaacgaacatggtcgccatattctgaaaaaccaaccggtaataaggtgttcggcgcaatcacacggatatctttacatccgagtgtttgaagtgcagctacatctgaacgcgcaacgcgagagtgtttaatgtcaccaataatggcaacactcaagtcttcaaatggttttttcgtctcacggcgaatagtgagcatatcgagcatcgcttgcgttggatgggcatgacgtccatctccggcattaataattgcgactttcggacatacatctttagcaatgaaatgtgcagcacctgaagatgaatgacgtacaacaaaaatatcggcagccattgcttcgaggttccaaagcgtatctcgtaaagtctcaccttttgacgtgcttgaacgtgcaatatcaatgttcaatacattggcagacaaacgttttgctgctgcttcaaaagtagtacgagtacgggtggagttttcaaagaagagattcataaccgtccgaccttctaaaagcgggcggttaattaaattattattatcatctaaaaagctttgcgcggtatctaaaatcttagtgaggttttcttttgaaaggccctcaatcgttaaaaaatgttttaaatttccgtcttgattgagctgaacctggctcggttgatgcaacgctgcaatatgcataatggattcctatgggtcgaatcgcgaaaacgtgcatagtgtagctgaattccgttcttttcgcagaagaactttacagaataaggccctaaattgaccagaaaatttagagccgtgctcagattaccttaaagcaccaatataatgatgtggcacttgtgcccgataaatgtcttcggctgtgatttctgattcttcactagtttgaatacttactgtcatttctttttgagactgctctggtattgaatccgtcaataccattaatcgttcaacacagcgttttaattcgtcatcttctgcttctagtgccagtgcaattacatatttcgcatagtctttatttcgaacaacatacattgcatctatcacccgtcccgttactctgcgcatacgcacataaatttgagtagctagtgtgaaagcttctgcattcgctataaaaccattccccatcatatctttcatttatattcccctatgtattcaaatcatgaaattggttaaaaaccatcaataatgattaattaaataagttttatttcgaaagatttagcaaaatacataccagtttttatattttaagctttaaaaatcaatttattggttgccaagtgataggttgcaataatttaaaaacttttagacaccaaaatacgttaaactttgcatcgttaatatttatatgttttggtcaatcgagtttatgaatacctctttacgtttaaaccactattggattacttgtgctgatggtttagaaaccctcttacaagaagaaatagaacagcttggcaccaaagtgacagaacgtaaagcaggacgtttaatcattgaaggaacgcttgaacatgcttaccgtatttgcatgtggtcacgtcttgcttcacgtgttttacttccaattcatacttatgaacttgaacgtacccacgatgcacgtgatgtagcagaagagctttatgaaggtgcaattagttttgattggtcacttatttttgcaccacaaagtacctttgcaattcgcttacacgcagagcgtgaaattaaggtaaatacgcagtttgcaacccttcgtgtaaaagacggtgttgttgattcctttatggaagctgtaggtcgccgcccaagtattgataccaaacaaccggaaattacattatatgtgcttgcgggcaaaaccgagcatacatattgcctagatttatctggtgattcattacataaacgcggctaccgtcgtttcatgacagatgcgccaattaaagaaaacctcgcagcagcaattttacaaaaagccaagcttaaggaacgtaacccggaaattgtacttgacccaatgtgtggttcaggcacatttattattgaagcattaatgattttaactgatcgtgcgccgggtcttgtacgtcgttttggttttaatggctggcatggtcatgaccgtgaactttggctttcactcaaagccgaagcagcagagcgtcatgaaaaagcacttgaacaaccgttacctaagttttatgcatacgatgctgactgggaagctgtaaaagcaacacgcgaaaacattattgcagcaggttttgaaaagctactaggcgatattcaaattgaagagcgtactttagcagactggccagatttcggtgctgaaaataaaactgcttttatcgttaccaaccctccatatggtgagcgcttaggtgacaaagcttctaaccgttctctttacttaggcttatctgccctcttacaaaagaacttcccaaatcaatatgcagcaattattgccgcacaaattgaacaagcggatgttttagcatttgaagcaccagaaacattacgattaatgaatggtaaattaccgatttatgttcgtttcggtacagttaaacctgaaaaagtcactcaacccttcttggcaaactggcaagctcaacctgttgaaatggaagaagctcaagactttgctaaccgtttgcaaaagaacatgactgccttgaaaaagtgggcaaccaaagaaaatatctattgcttacgtttatacgatgcagacctccctgactttaaccttgctgtagacttatacggcgaccgtttacatgttcaggaatatgcaccacctaaaaagattgatcctgaaaaagcaaaaaaacgttttaacttagcgcttgctgctattcgtgcggtgacaggattaaatcgtgatgcaatctttattaaaacacgtgcgcgtcaaactggtaccaatcagtacaccaaacaaagtacagccaataaacgtttcatcgtgcaagaaggtaaagctaaaattttagtgaacctaactgactacctcgatacaggtttgttccttgaccaccgtcaaatgcgtttacgtattgctaaagaagcacgtggtaagcacttcttaaatctttatagttatacctcgacagccagcttacacgcggccttaggcggcgctgcaagtacaaccagtgtagatttatctaatacttacttgagctggtcaaaagaaaacttcgttttaaatggtttaacagtagatcatgcagacgagcagcatatgttctttgcaagtgactgttttgaatggttaaaagaaggtcatgaacaatacgatcttatttttattgacccgccaacattctctaactctaaaaagttccacggtacttttgatgtgcagcgcgatcacgtctctttgattaaacgtgcaatgaaccgcttaacaagtgaaggtacactttatttctcaaataactatcgtggttttgagatggatgaagagatcgaggctttatatgaagttgaagaaattacttctgaaacgattggacccgattttaaacgtaatcaaaaaatccaccgtgcatggaaaattcagcatcctggattaaattaatctgaatttgaaaaggaagttatcattacttcacggtaatgataacttcaccatgtacattctttgactcaaaatcataacgcgtaaatcgatcagctctttctggcagagcaaccatttctaactttttcttctcttttccatcaatgacctgattttgcttttgttcttgataaggtgataacacacttgtgcgcagtgaattccatcgaacctgctgtaaatagttatcccctagtgtttgccgaacttgacgttgctctatttctggcttcttcgcatcatcttgagctttcgcaataattacgggtagagctgccgttactgctcctgtttgagttgcaagcgcactttcattcataggctgtgcagcccatagattcgtcggtaataccgctatacaacttaaaattcccagcacacacccttgcttattgttcatcatgttcatcctaaaattgttattgtttgttatatcgaatcaaactaacaagtttttaaccttgtcgcaatgttataaagaaacttcccgataattagcattgatcattttaaaacctgaaattcttcacaggctttttgtgaatattcaaatagttttatagatttttatcttagacttgaaccatacccttagatcacttaacgtgattttataatttatttgtagttagatttattcataaataaacaccatacgaggtggaataatgcttcagcaatgctgtcagttattagaagaccgtttacttaaagtcgcgtttattgaaagtgccagttcaggttacttaaccagtcagttttcgattcataaaaatagtggtgctgatattttactgggtggattagtcagttatgaccccagtattaaaatcagtgttttaaaagttgatccaaagttaattgaaacctacacagcagaatcgccacaagtaactgaagaaatgtgcaggcttggtcaaaccctatttcaacaagccgacattgttgtgagctgcacaggtttattaaaacctggcggaagtgaaactacggaaaaacctgtaggtactttctttatttgtatttcttatctaggacgtatttatcattaccattattttttatcaggtcatgccgaacaaaaacttaaaactctcacacagaaagtagcagactcaattattgcgcttatatcttcaaatcagcataaaagttaaatataaaaaaagagaatatgtttccatattctcttttcggttttagcagaaaaaacttagctgagtttcagcttatcaaacactaagtgaccattttcgcctttaactaaaatggtatcacccgcaacaaagtcacctgacaagattttttgagctagtgtattttcaacctgttgttgaattgcacgtttcaatggacgcgctccgtatacaggatcaaaaccagcgtcaatcaataagtcaaatgcactgtcatctacagttaaactcatatcacgatcaacaagtcgtgagcgtaagcggtccaactgaatatcggcaatgccacgaatctgtgcttttttgagtgaatggaaaatcaccaactcatcaatccggttaataaactccggacggaaatgctgacttaccgcattcattacaatagtacgcacttcatcatcagttgcaccttcaccaagttcacgtacatcttgtgaacccaagttcgatgtcatcacaataaccgtgtttttaaagtccactacacgaccttgtgagtcggttaagcgtccatcgtctaacacttgtagcaagatattgaagacatctggatgcgctttttcaacctcatcaaacaacactacgctatatggtttacggcgaacagcttcggttaaaacaccgccctcttcgtaacctacgtaacccggaggcgcaccaactaaacggctgacagaatgtttctccatgaattcactcatatcgatacgaatcatggcatcatcactgtcaaacaagaagttagctaaagctttagttaactcagttttacctacacctgttggtcctaagaacaagaatgatccgctaggacgattcgggtcagacaaaccggcacgtgaacgacgaactgcattcgataccgcaacaactgcttcatcttgcccaacaacacggtcatgtaaaaactcttccatatgaagaagtttttcacgctcgccttgcatcattttagcaaccggaatacctgttgcagcactaacgacttcggcaatttcattttcagttacttttgtacgaatgagttttggctcttcgttttcttcagcaacttcatcttgttcaagttgtttttgcaactctggaattacaccatattgcaaacgtgctgcttctgccaaatcgccttcgcgctgagctttttcaaaagcaatacgtgctttatcaagttcaacctgagcttgtttagtgccttctaccaatgttttctcagctttccacacttcttccagatcgttgtattctttctcgacttcagcaatctgtttttcaagatgagtaacttcggccttactgcctgcgtcttcatcttttttcaccgcttccaattgcattttcaactggattaaacggcggtcaagtttatcaagtgcttctggcttagaatcgatttccatcttaatacgagaagctgcctcatcaatcaagtcaatcgccttgtccggtaattgacgatctgtaatataacgatgagacattttcgccgcagcaataatcgctgaatctaaaatctgtacgccatggtgagtcgcatacttttctttcagaccacgtaaaatcgcaatggtatcttctacacttggttcatcgaccagcactttttggaaacgacgctccaaggctgcgtctttttcaatgtattggcgatattcatctaaggtagttgcacccacacagcgcaactcaccacgagccaacgcaggttttaacatattacctgcatccatcgcgccgtcacctttaccagcaccaacgagcgtatgtagctcgtcaatgaataagatgatttcgccttcgtgtttcgccaaatcttttaaaacagcttttaaacgttcttcaaactcaccacgatacttagcacctgcaagcaatgaacctaaatctaacgataaaacacgtttattctttaagccttctggtacttcaccattaacaatacgttgtgccaaaccttcaacaatagcggttttacctaccccaggttcaccgatgagtactgggttatttttagtacggcgtgacaagacctgaatggtacggcggatctcatcatcacgtccaatcaccggatcaagtttccccgataaagcccgctcggttaaatcaatcgtatatttattaagtgagtcacgttggtcttcgtgattattactcatgactttgtcactacctcgaatattttcaattactttgcgtaagctgtcgggagttacacctacggcacttaaaatattttttgtttcaccagtttctgccaagcccaataaaacccagtcagttgacaaaaattcatcgccagctttttgcgcgtatcgatctgccaagttgagtgctttaactgcttctgggtttaaattgacatcgcccgtcgggttagcaatagtcggagcatcttttaaagcctgctctagcttttgtttaagttcaggtaaccgtgcacctgcttgttgcaacaaactaatattggacggctcttccaataaagtactcaaaatatgaatacctgctatagctgtatggtctttacccatcgctaaggattgagcatctgagagggcttgctgcaagcggttcgtaaatttttcaaatcgcattcttgttattcctcacaacaaattcgtacttgtgtaatagatgggaacactttttcggatttcaaataaatttttatatatttttcattaagttataaaaaatactgcgagtaaaactcgattataatatgggtttgttttgtatatatttcaagtacacttcggctacattttattaaatatcttgaatatttatatttactctcatctattttatggtcttcacaaagacttcattgagaattcccaaattaagaattaatttatcttgccaattccatcctgttttttgaaattaaaaatgcgcttaaaacatattatattaacaacttgtctttttagctcgactctagcaatggcggagttaccccaagactcaagaagacccggtggtattgcagttattcctttaacgtcggatattactcaggtcacttttcaacacaaaccggttttaattagccaagaaggacagcagcgttatgcagttttcggtattccgttatctactccacttggtagtgttcaactcgataccaataaagcccctattcaaatagaagttaaatcttatccatatgctgagcaacgccttaaagttacgaatcaagactatgtaaatcccaatcaaagtcaattagatcgttacgctcaagaagctaaagaacaaaatgatgtttatagttcatttacgcaaagttcgtggcaagccttaccaaaatttatacgcccaacttcgggtaaatttaccaattcttttggtagaaaacgcttttttaatggtgaagaacgtgctccacactcaggtctagacattccagcaccaataggccaaaaagtagttgccccagcagacggcgtagtcgttcaaacaggtcattatttttttaatgggcaaactgtattaatcgatcacggccaaggcttaattagtatgttttgccatttaagcgagataaaagtagaaaaaggccagcatattcgtcaaggggaaactttaggtctagtcggtaaaacaggacgtgtcacaggccctcatttacattggggaatgagccttaacaatgcacgggtagaccctcaactttttctaactacgactcattaatttaaagctttacgaaagtactttggcgcttcgacatagccttctcttaggtaaaattgatgtgccaaaggtctttgtatccccgaatgaagttccattcggtcacaaccacgttgctttgctaaccgttcggcttcttgtacaagcaaatgccctactcctttactacgcatcttctcgtcaacacacagataacatattttggcaaactcaccttgtaaggcaatttgtggaataaaataaagcgataaaattccatacacttttaaatcgtcagctgcgaccaacgtaatcgcattaggatctttacttagtatttgaaattgttcttgaactacttttaaaggctgtgaatatcccatttgtttaagtaaataacatatggtctcggtatcttcccattgtgctaaacggatattcacataactctccttttattttttaattattcttatcataaaaaaagccaacatgactgttagctttttattttttaggcattcacaaataaaattacgctgcttcaataatttcaaaatcgtgagtaatttctacgccaccatctgaaagcattttacttgctgaacaatatttctcagctgatagctctactgcttttgcaacctgtttttcttttacagctttacctgtcactacaaagtgtaaatggatcttagtgaaaactgccggaattgcatctgctctctcagctttaagctgacatacgacattcgtcacatcttgacgggatttctttaaaatagtcacaatatcaaacgaagcacacccaccaagtcccattaatatcaactccataggacgtggtccacggttttcaccaccgtactcaggtgagccatccatcactacactatgaccgctctctgatttcgcttcaaaagcaacattctctagccaatgtacacttgtttgcattgcaactacccaaaaaaaattataaatttaagcagggtctgttgacatttcatctatggattgcgtaatagctaaaaattaatccaaataaaacgcaaaacacagacaagggcaatcctttgtccagttttgtaataaagtttgttaaatttcagccggaatctgaggtgcaattaaagcatctttgatgcagcgcaaggccagattttttgttcgtttcgttgttaagctctattgatttagaatgactaaattccatagttcttgcttcgtaacgtccagaaaaattgtcttatgtcgcaaccatctgtgaaatgtcaacagacccttgttttgtacactaacataaaatgagttgataaggaatttcatctcttctgtgtaatagctcatctcgagcttgtgtgaattgtttaccctattcggaacatatcaagcatgacttcaaatttttcacaactcagcacagatgctttatctccggggcaactacctgaatccgttaaagcattgttaaaacgtgctcacatcaacagatatccaaaacgaaccacaattgttgatgccggaacagagtcaaaatctttatatttaattttaaaaggctcagtttcaattattttacgtgaagacgatgaacgtgaaattgttgtggcatatttgaatcctggtgacttctttggggaaatggggcttttcgaaccgaaccctcaacgtacagctgaagttcgtacccgtgatgtctgtgaaattgcggaaatttcatatgacaacttccacgaactgagcaaacagtatccagatctcagctatgccgttttcgcgcaactcgttcgtcgtttaaaaaatacaactcgtaaaatgaccgatcttgcatttattgatgtgtcaggccgtattgcgcgttgcttaatcgacctatcttcacaaccagaagcaatgatcttgccgaatggccgtcaaattcgtattactcgacaagagattggacgcattgtcgggtgttcacgagaaatggttggccgtgtattaaagaccttagaagatcaaggtatgattcaaactgacggtaaagctattctaatttttctctgtacacgataaaaatagataactcattgaaataatgtcataataattgttttctaacgacgaatactatgacacatctcaatgagttatatcttatcttaaacaaatatctaaaatggaacaagtcacatttaaagtgctttgcgctcatcatgcttgtgattattttaaagcaaacatgtaatctttcttctgcatctaaagccttgcccatcaagtgcttaccacaatcattttatcgacgtatgcagcgcttctttgcaggtcagtattttgattatcgtcaaatttctcagttgattttcaatatgttttcattcgaccaagtgcaactgactttagatagaaccaattggaaatggggaaaacgaaatattaatatcctgatgctcgcaatcgtttatcgtggaatagcgatacctatcctttggacattgcttaataaacgtggaaattcagatacgaaagagcgtattgctttgattcaacgctttatagccatttttggtaaagaccgtattgtgaatgtgttcgcagacagagagtttatcggtgagcagtggtttacatggttaattgaacaagacatcaacttctgcattcgtgttaaaaaaacttcattgtcaccaatcatttaggaaagaatcataaaattagtgatttatttcgccatcttaaagttggtcaaattgaatgtcgtaaacgacggattttggttggtcgggtgaaactatatataagtgcactacagttagaaaatggagagcttttactcgtcgtttctcctcagtttaatgccaatgctattcaggattatgcattacgctgggaaattgaaaccttattcagttgtctcaaaggacgcgggtttaatcttgaaaatacgcgcttgacagaccctagacgagtgaaaaaattgattgcggtgttagctataagcttctgttggtgttacttaacgggtgaatggcaacatgatcaaaaaaaagcgataaaaataaagaagcatggacgactctcaatgagtttatttcgctatggtttagactatgttcaaatggcgattcagcgtttaattggttttgggaaaaaagaagagtttaaggaaattttggcaattttaagaaggcagaaccctgataggataagggttctgtgaaatttgtcgtgtacagagctaatttttgatacttcattagaagaaactccagtcactgatgaagactatgatgacgaagaataattactcgtaattattgaataaaaagcaaacttcggtttgctttttttatatgcaacaatgagttaatacacaaagcttacaaactattctgtttttatgatttaagttgaatacatattctccgttaggctaacttaaaatttcttaaggatttcgcagtatgcaatttaaaccacttggtcacactggcattaaccttcctgaaatttgcttaggtaccatgacatttggtgagcaaaatactcaacaagaagctttcgaacaactcaattacgctttagaacacggtttatatttttgggatacggcagagatgtattccgtgcctcctaagccagaaacatatggagcaaccgaaaccatcttaggcaattggtttgcacagcatggtcagcgcgataaagtattccttgcttcaaaaattgcaggtcccggctttggtggaacacatattcgagacggccataccaagtttaatagtgaacatatttcacaagcgattgatggctctctcaaacgcttaaaaactgattatattgatctttatcaattacattggcctgaacgccataccaacttctttggaacgctcgcttatggtaatcagcaagcccaaaatgattatgacactactcccttagaagaaacattactcgctctccaaaaagagattaatcgaggccgcattcgttacatcggcttatctaatgaaacaccgtggggcaccatgaagtttcttcagcttgctgaaaatttaggtgtgagtaaatttgtgagtgtgcaaaatccgtatagtctgcttaatcgcacctatgaaatcggtatgtcagaaattgccaaatatgaaggtgtaggtttacttgcatactctcctcttgcttttggttatttaactggcaaatttagaaatggggctcgaccagccaatgcccgcgttacactcttccctcgctttagcagatacagcaatccgcaaagtgaatgggcaactgaacaatatgcacagcttgctgaaaagcatggtttaagcctgactcaattggctctggcttttattaagcagcaattttttgtgacgagtacaattattggtgcaaccaatttagatcagctcaaagaaaatatccaagcttttgaaatcgagctttcaccagagattttacaaggcattgagactattcatatacaacagcctaatcctgctccttaaaaaacaaaaacggatgctcaagcatccgtttttaacatcagttctataagtgttaaaacttacttacgaccattataaatagctaatgccgcaggtaaattcttacgcatgtcattaatacgttgagcgtttgatgggtgagtagacaagaaagatgatccactgccttcaagcttgttcattttttcccaaagcgtaatcgctgcattcgggttataacctgcacgcgccattagcattaaaccaccttggtcagcacggctttccaaactacgagaatatggcagacccacacctacttgcgtgcctaactgagccgcagccgcgcctagttgactcacattaccaccattaatctgacttaagccaatatttaacgctaaatcagttaaagcttgtgcgccaattttactttttgcatgctcttccaaggcgtgagtcatttcatggcccataactgctgcaatttcagcatcagtcaagttcagtttatttacaatacctgtgtagaacacgaccttgccaccaggtgcaacgtaagcgttaatcgtatctgacttcaatacagccaattgccaactaaatggctggcctgtctgattcatttgattcgcataaggttttaaacggttaaaaaccgcattaatacggttataggtacttgaacttgtatctaaagcacctttaccacgcgcttcctgcaccattttattgaaactttgtgcagattgagcatttaaggttgcagtatctgcacctgccatatcagccattgtggcacaaccagaaattgttactgcacctgctgcgcacaagcttagaacgaactttttattcattaacatgggtcacctaaatcgttaaaaaactgtttattcttttgcacttattataagaaataccactcacgctttaaatctctcatttcttcacgatcatagtatttatgtaacggtcaattagataaagtcatcaaataaatccagaatattaaacatattatgtttaaaccaagataaacgtgacttaaagtcttaactttctcttcaagattaggatttttcctcttccagagtaaataactgttttgtatgagaacaacagggatgaggacacaagcaatcaggacagaaagactcataaatgccgtcatgaagaagtccggattataattttgaccataaataatcagcattgctaatgtgggtgaaccacctatagcaaataaaaaagaataaaaaatggtttttgaaatagtgggttgcagcttcatcctgagcctatgattcctgaactatatatcatgttttaatctgaatcgaaccaaaccaaaactgcactttagtagggtataaaaaaagcccccttttaggaggctatttttatctttgcgaattacgcagagaatggatgacgtaaaatgattgtttctgcacggtctggaccagttgaaacgatatcaatcggacattcgattaattgttcaatacgttttacataagccaaagcatttgcaggtaattggtcaatgctcgttaaaccaacagttgactcgctccaacctggcatagtttcataaattggtttcaagcattcgaaagaaaccgcatcagaagaacctacacaacctgaatctgtattttcataacccacacagattttcacttcttctaaaccatctaaaacgtcaagtttagttaagcaaatacctgaaagtgagtttacatctacagaacggcgtaagatttcagcatcaaaccaaccacaacgacgttgacgaccagtagaagcaccgaactcatgacctacagtacccaaatgtttaccaattgggtcaccagaatcacttgcagcatcgtaaaccaattcagttgggaacggaccagcacctacacgtgttgtataagctttcgtaatacctaatacataatcaagatgtaaaggacccatacctgaaccagaacttacaccaccagcagttgtatttgagctggtaacatacggataagtaccgtggtcgatgtctagaagtgaaccttgagcgccttcaaacattacagccttaccttctttgcgatagtcatgtaatactttagttacgtcaatcactaatggagcaagaacttcacgccattggttgcaaagagctaatacgtcttcaaatttaaccgcttctacaccgtagaactgagtcaattggaagttatgtagctctagcatttcggctagtttttcttctaacgctgcaccaccacgaacaaggtcagcaacacgcactgcacggcgcgcaactttatcttcgtacgcagggccgataccacgacctgtagtaccgattttagcgttaccacgtttcttctcacgtgcctgatcaagagcaatgtggttaggcaaaataagtggacagtttggagaaatgcgtagacgctccttaaccggaacaccttcagcttccaaaattcccatttcttcaattaatgctgctggtgaaagcaccacgccattgccaattaagcacaatacgttttcacgtaaaatgcctgatggaatgaggtgtaatacagtctttttaccacctacgacaagagtatgacctgcgttatgtccgccttgataacgtactaccgcagccgcctgatctgtgagcaggtcgacgattttacctttaccttcgtcgccccattgggtaccaagtaccacaacatttttgcccataatagcctcattacatcatgctgttaaaattggaaaccattagtaaaaaacttactgctggcgtttaaatcttttcaatattccattgtccgttttgcaataccaattgatgtgttgcataaggaatagaacttaaatcatcattacctaacaattgaactacacgtaaaccctctgaacgcgcattcgcaattgctttaagtaaatcagcttctgtacctttaggtgccactacagtttcgatttcggcaaactggttcgcacctaaagcatataaatcacaactaaaaccggtagccggacgtgcacgaccgaagtgttccccaataccatcataacggccaccttgcgctaaaggtgcagcacgatttggtgcataaactgcatacatcaaaccagtgtggtagtggtaactgcgaagttcaaccacgtcaattccaacattaagtgctggccaacggtttttaatctgttcgagagtggttttaagtgcatttaatgcagcatcaaattcagcatcttttaaaatatctgcacttaaatgcgcttgtaaggcatctaaatcacttgcataacggccaagtgcatagaaatctgaacccatatttaaattttgggtaaattcagctaactcaggtaatgcttttctttgataaagatcagataactcatgctcttcatttttagaaagaccagcatattttactaagctacgaaataggcctacatgccctaagtctaaatgtgcgccttgcaaagtataggcattttcaatcagaccaagcatcacgtcgaccatttcgacatcagcttcaatactatcgtgcccatataactctgcgcctaattgtaaaggtgcgcgagtcgcattgaaattttgtggttttgtatgtaatacagtccctgcgtaacagtaacgtgcaacaccttcaacaggtcttacatgtgcatcaatacgtgcaacttgcggtgtcatatcagcacggataccgagtaaacggcctgaaagctggtcaatcaccttaaaagttactaaatccaggtcttgatttgattctgataatgaagacaacgattcgatgtattcgataaatggtgtatataccagttgataacctcgtactgcgaggaaatctatagcttcacggcgaagtttttcaatgacttgcgcctgttccggcaatacatctgctaccccgtcaggcagcaaccatgtctctgaaatggtcatatttcaagcctaaaatctgatcaacgtggaacgaccccacataaaaaaatcgggaacacacccgatttctcttagtgtagcatgatactttgtgccatgcacctgacaatttgcataaatctttcttaataaactctaaagtcaaaaagtagactctatgaattaaaaataatattcaaagacttattgtttttgacttccattatcaataaaagttcttagaccaaagaatggggcaataactgaactatcacccggtttccaattaaccaaatttaacttttgaaagaatcacacaaatccaataaacgatttgcatagccccactcattatcataccaagcaaatactttggcttgatgtccaacaaccatggtttgagttaaatcaacaataagtgaatagggcgaatgattaaaatcacttgaaactaatggttcatctgttacagccataatttctgcataatctgtttgagatgctttaatcagcaattcattaatatgatggaccgtaattggagattgcgcgataaacgttaaatcaattgccgctacattaatggtaggtacccgaattgagtaaccatcaatacggtcttccatttttggcatcacacgctttaaagcaccaagcgcactagaagtagtcgggataatgttttgtccagaagctctagcacgacgcaaatcacgatgcgcatgatcaagcacagactgatctgctgttaccgcatgaatttcggtcataagcgctgtttctatgccaaatgcatcatcaatgattttaaccagtggaactaaagcctgtgtcgtacatgacacactcgatataatctgatcagtcgctttcacatcagcatggttaacaccataaacaattgcagcatcaacatgatcaaaaggcgcagcgccaataatgacccttttagcccctgcttctaaatggcgggtagcatcagcatgggagcggaataaacctgtacactcaagtacaacatcaatttttaaacttgcccacggtaaaagttccggctgtttttgctgcaaaacttcaacctttaagagtctctggttagattgaatatttaaataaatcttttcattttcaatggtgatatcaactttgccattaaaacgaccatgcgttgagtcatatttgaataaatgtaccagtgtatgtacatctgctatatcgttaatcgccacgatttcaaaatgaaattgtttcgggctctcaaaccaggcacgtaaaacattacgtccaatccggccaaacccattaatggcgatacgttgcatgacctatccttatctacaaaacgagaagcgaaagaaggcatatagtaaaacacgtcatggctaattgaatatagatttttagccaaatcacagttttgtaagatattccctctaaaatcgttggttcggtggggtttttccgttacaatttagcgttttttaaaaataagccccgtatcacgtgcgagttttatgaacaaataaacttgtggtgatgcttttagccaaattcgaaaatatggagtgacttggttgtgagtactcgtttaatgacatctgctgaaattcgtgaagcatttttgcgctactttgaaacgcaagggcatacacgtgttgcatcgagttctcttgttcctgccaacgacccaactttattatttacaaatgctgggatgaaccagtttaaagactgttttttaggtcttgaaaaacgtgattatgtacgtgcaacaacatcacaaaaatgtgtacgtgcaggcggtaaacataacgatttagataatgttggttatacagctcgtcaccatacattctttgaaatgttgggtaacttctcatttggtgactatttcaaacgtgatgctctcaagttcgcatgggaatttttaactagcgaacaatggcttgctttaccgaaagataaactttatgtcacggtttaccatactgatgacgaagcttatgacatttggaataaagaaatcggcctagcaccagaacgtattatccgtattggtgataacaaaggcgaaaaatacgcatcagataacttctgggcaatgggtgatacaggtccttgcggtccatgttcagaaattttcttcgaccacggtgaacacatttggggtggtttacctggctcacctgaagaagacggtgaccgtttcattgaaatctggaacaacgttttcatgcagtttaaccgtactgctgatggcgtacttcacccactccctgctccatctgtagatacaggtatgggcttagagcgtatttctgccgtattgcaacatgttaattcaaactatgacattgacctgttccaacacttattaaaagctgctgcaaacatcattggtattgaagatgaaggtcagccttctttacgtgtagttgcagaccatgcccgctcttgctgcttcttaattgctgatggtgtaaacccaagtaatgaaggacgtggttatgtattacgtcgtattatccgccgtgctgtccgtcacggtaacaagcttggcgcaacaggtacgttcttctacaaaatgttgcaaccattaattgaagtaatgggacaggcttatcctgagttagaagctcgccgtgaagtcattgaagcaacattaattcgtgaagaagaacagtttgctaaaaccttagagcaaggtttaaaacttcttgaaggtgaacttgctcagttaaaagataaaactattccgggtgcgactgtatttaaactttacgatacttatggtttcccaacagatttaactgctgatattgcacgtgaacgtggctttattattgatgaagcaggttttgaagttgaaatggctgcacagcgtcaacgtgcgcgtgatgctggtaaatttgctgttgactataacaacattgtaaaagttgaaggcgaaactcagttcgacggttataccaacacaaccggtcaaggccagattgtagcgatctataaagatggcgtacaagttgatgaagtttctgaaggcgacgaagcacttatcgttttaaaccaaactcctttctatgctgaaagcggtggtcagattggtgatactggtatcttcaaaaacgaaacaggtatttttgaagttcaggatacgaaaaagtctggtggtgcctttgttcatcaaggtattgtgactgttggtaaccttaaaaccagtcaaaatgtagaagcgattgttaaagccgacattcgtgaagctactgcgcgtaaccactcagcaactcacttgttgcatgctgcccttcgtcaaattttaggttcgcatgtacaacaaaaaggctctttggttgcaagtgatatcttacgttttgactttgcaaatgaccaacctgtgtcatttgaacaactacaacaagttgaacgtctcgtaaatgctgaaatcattgcaaatactgctgtaacaactgaactactcgacattgaaactgcgaaagcaaaaggcgcaatgatgttgttcggtgaaaaatacggtgatgaagttcgtgtgctctctatgggctcagtcattgacgagaaaaacttctcaatcgaactttgtggcggaattcacgtaaaacgtacaggtgatattggtttattcaaaatcacttctgaaggtggtgtggctgccggcgtacgtcgtattgaagcagtgaccggtactaaagcattagaagtagtacaaaaagctgatcatgatatccagcacattaatagcttattaaaagcacagaaagaccaaacggttgagcgtgtacaagctaatgtagaattggtttctgcattacaaaagcagattgaacaactcaaccaaaaattggcaaacttccaagcggctgatttgattgaccaagttcaaactattgctggtcgtcaaacgcttattactactgttcagggtgttgatgctaaagcgcttcgcaacttacatgacagtgtaaaatcaaaattagagaacgcagtgattgtgttagcaggtgtagagggtgacaaagtcagcctgcttgcatcagtcgcgtcgcaatacactgcaaatctaaaagcaggtgacatcatcaaacatctagcgaccgagttaggtggtaaaggtggtggtaaacctgacttagcacaaggtggcgcgccacttaacgagaagtttggacaagttatggcagcattacctgcttggcttgaacaaaaataagacttcactttttgtgtaactgaccctgacaagcctctcagggtcatggcttatatggaacaactatggcattaatcgttcaaaaatatggcggtacttctatgggtacccccgagcgcattttaaatgttgctcgtcgtgtgaagcgttggcatgatcacggtcacaaagttgttgtggtcgtatctgcaatgagtggtgaaacaaaccgcttacttgccctcgctaaagccattaccgaaacacctgacccacgtgagttagaccaaatggtttcaaccggtgaacaggtgacgatttccatgttagctatggcacttaattcgattggtgtggaagctaaatcctataccggacgtcaagtcggtattaaaactgacagtgcatttactaaggcgcgtattgagtcgattgacacagatgtcatgaccaatgacctagatgcgggccgtgttattgtagttgcaggcttccaaggcttcgatgccaacggaaatactacaactctaggacgtggtggttcagatacttctggtgttgccattgcagctgccctaaaagcagatgaatgccaaatttatactgacgttgatggggtttatactacagaccctcgtgttgcccctaaagcgaagaaaatcgatcgcatttcttttgaagaaatgctagaaatggcatcattaggttctaaagttttacagattcgctcagtagaatttgccggaaaatatcaagttcctttacgcgtattatcaagttttgataatgatgacgacggcgcatttgacgacgaatttaaagaaaatgtaggtacactcattactactgaggcagaagacactatggaacagccaatcattgcaggtatcgcttttaaccgtgacgaagcaaaattaacaattttaggtgtacctgatgaaccgggtattgcttctaaaattttatcaccagtaagtgatgccaacattgaagtggatatgatagtccaaaatgttgaagaagatggcacaacagatttcacgtttactgtaaaccgtgttgatttagcaaaagctgaaaaaatcttaaatgaaactgccaaaaatattggtgcacgtgaagtttcaacacgcgatgacatcgttaaagtatctatcgtgggtgtaggtatgcgctcgcatgcgggtgtagcaagcaaaatgtttactgcccttgctgacgaaggtattaacatccttatgatttcaacatctgaaattaaggtttctgtcattattgatgaaaaataccttgagcttgcagttcgttgcttacataccgcttttggtttagatcgtgaacatggtgaaagcagcgcacgcgcttaattttaccgaacggtcaagaattcattaaaaaatgtttacttgtccgacaataatcaaagaaaacacagagccgctatagttttttttatagcggctctgttatattaaacggaaagttttttggcagtgattatcaaaatatgactttgttctcatatttctgttagaatctgactgaaaactgaggttgagctttttatttgggtaccaatattgcagttttaagcgtttagcaaggagataaacatgctgattctgacccgccgtgtcggggaaacattaatgattggggatcaagtcagtgttactgtgcttggcgtcaaaggaaaccaagttcgaattggtgtaaatgcaccaaaagaggtttctgttcatcgcgaagaaatttatcaacgtattcaacatgaacgtgcaatgcatgaacaccttcaacatcttgatcaagattatcaagtttcatatgaagatgataattatgcacagaaaaacttcaatcgttagtatgaagttgttctctccctaattaaagcgactttatagtcgctttaaattttttgggaatatataaatttatagtcctaatgcccgttttacaggtgcataactacgacggtgttgatcaatcacgccatgagcagcaatggcttcaaagtgtgctttggttggataccccttatgcttggcaaaaccaaataatggatattgttgatctaattctgccatttgacgatcacgcgtaactttagccaagatactcgccgcactaatttcggcatggcttgcatctccccctacaatcgcctcacaaggaataataattcctttggggatttgattgccgtctacaattaccttttgaggttgtgttttcagaccttccactgcacgttgcatagccaaaaaagttgcctgcaagatattcagctcatcaatttctgcatgtgtagcttctgctattgaccatgctaaagctttttcttgaatttcaataaacaacttttcacgtttcttttcagttaattttttagagtcgtttaatcctaaaattggattattcggatctaaaataacagctgcagcaacaaccgaacccactaatgggcctcgtcctgcctcatctacgcctgcaacaaacatgtatactccaatgaaaaagaggccgatttataagaatcggccttctttaatgcttaaaacatcaattatttttgtaaagcttctgccacacaagcatttacagttttagaaaccacttggtttacgattgtagcacgtgcattcacgtcaagcgcagcagcagctaattctactgcagtcacactatttggtgctttttcacttacacagccgcaaacattcgtttggatgctatcacgctgttcagcagtcatatattttgttgctgtcttccatgcagcaacattattaatttctgtaatacatttcgcattaacagcaacttttaatgcagctacgcctaactgttgagttgttgtttgtgcagaagcaccgccagtaccggtacctgtagtggttgcacatgcagttaaagctaaaacaactggtgctacagcgagcatcaattttttcatcattttttcctttgatcgaacgtaagcagcgcgtattttgcctaaacttgtgcttagaagaaacaaataaattgatgcatttatgcaaattaagtcccttaatctctagctcaacttaaccgtgttttttaaattgaagcgttctgtttatagcacgctctgttacgggaacaacatttctcaaatttaacagtttcccataaaatctagcgctagaatgacaaaaaaagggtcttttatgcctgcctcaacctctcaatactacacccgtactgcacagattctgcattggatcatggccatcatttttatcactgcttgggtgattggtttctatagtggaaattttctaagttatgacgttgatggcagctttaaaggcgatgtcattacactacataaaaacatcgccacaaccattatcttcctcgtggtcattcgtctgttttggcgttacacccatcctgccccacaattgcctgacacgatgtcaccaacaatgaaaactttagctcacaccggacatttattactgtatgtgattttagtcgctttaccagttactggctgtttatttagctggagtgctggtcaccctgctccggttttatatttatttgaaattccacgcctggtgcaagataaccctgagttattagccattgttaagccattacatatttatatttcatggtttgcaggtttacttattgttggacatgtacttgcagctttaaaacatcactttgtagataaagacaatgttttaaacagtatgaccaaacaacctaaataaattcaatgttaaaaaaaccgcctatcacaggcggtttttttatttagattttctggatttctgaaatccacttttgtttctcttcatctgaaatgaaagaggcttcaaaagagttaattgcgagttgcttcaactcatcattggttaaatctaatgcctgttgaatggcaaagaaattatcattcatataaccaccgaaatatgaaggatcatctgagttaacagtcacgtgtacgcctttttgtaaaagacggcggatattgtggtctttcatatccttaacaacacatagctttaagttacttaaaggacaaaccgttaatggcattttttcattaattaaacgagccattaattgttcgtcttcttcagaacgcacgccgtggtcaatacggtttactttgagcaggtccaaagcttcccatacatattcaggtgggccttcctcacctgcgtgagccacgattaagaagccttcttcacgcgctttagcaaaaacacgttcaaatttagctggtggatggcctacttcgcttgaatcaagtcctacagcgataatatcttgtttaaacggtaaagcttgctcaagcgtttcaaatgcagcttcttcgcttaaatgacgtaagaaacacatgatcagctgagaactgataccaaatttggcttttgcgtcagcacatgcacgtttaagcccattgatcaccgttgcaaaagcaataccacggtcagtatgagtttgcggatcgaagaacatttctgtatgaacgacacgatcttctgcacacttttcaaaatatgcccatgctaagtcgtagaaatcttgctcatgaacaagaacatttgcaccagcatagtaaatatctaaaaatgattgaagattatgaaagttataagcttgctttacttcttcaacagatttgtaaggaatctgaatctgattacgctgtgcaatggcaaacattaattcaggttcaaaggtcccttcaatatgcacatgcaactcggcttttggtaaggcctgaatcagctcgacttgattcatattaactccacatctaaagaaaaaagggtgtggtaagcacacccttctataatttccttcttatatccctatcactaaaatagttctagaaggaaattataaacaatcgtattaaccgccaaaggcgataaatttaaatacccaaagggcagcaataatccacaccatgtatggaacagtttttgccttacccgtaaataatttaactaatgcatagctgataaagcccattgcaataccatctgcaattgagtaagcaaatggcataaatacaatcgttaaaaaggctggtacagcttctgtaatatcatcccaatcgatgtgagtgatcccttggatcatcaatacaccaatgaacaataaagcgggtgctgttgcaaaacccggcacagattgagcaagaggtgccaagaataaacagcaaataaataagaaagcgacaactaccgcggttaaacctgtacgtccacctgctgctacacctgaagccgattcaatatatggtgtagttgatgaggtacctaatgcagcccccgcaacaattgcagtagagtcagcaaatagcgcttttttcaaacgtggcaatttaccgtcttgtaaaaggcccgcacggtgtgaaacgccaaccaaagtacccgtactgtcaaacaagtcaacaataaagaatacaaagatgacaccaaccatacttgcggtaaacaacccttcaaagtccatttgcatgaatgttggcgcaattgaaggaatttcaccaaccacacccttaaattcatttagacctaaagctgtggcaattgctgtaacgactaaaatactaataataatcgcaccgcgaactttaagctgatgcaaaattacaataagtaaaaagccaaataaagccaataacacagtaggttgtttaatatcgcccaaaccgaccaatgttgcttggttcgcgacaataattccggcattttttaacgcaatgagcgcaaggaataaaccaataccaccacctatcgcaaatttaagcgacatcgggattgcattgacaatcgcctcacgaattttaaagaaactaatcgcaaggaatactacacctgaaacaaaaacagctgctaaagctgtctgccatggcactcccatgcccatacaaaccgaataggtaaaataagcattaagccccataccgggtgccaaggcgattggataattagcaataatacccatcactaagcaaccgattgctgctgccaaacaggtcgcaacgaatacggcgccatgatccatgccggtttcagataaaatgagtggattgacaatgatgatgtagcacattgttaaaaatgtagttacaccagcaagaacttctgttcgaaacgtggttttattgtcgcttaacttaaataaacgctctaaccaccctgccgaagaattgggcgccgccataagtagcctctatgcaaaatctgagctgtggaatatgtacttctatgtaggtatctgagcaatcttgtttttctgttcagatctctagacaaaaatcttaaatagacgaagcaacaaatatgccactcatttgatttctgctgtcatacacagaaaatagccacagcccctcttgaaacacaaaaaagctgcataacccctatgcagcttttttactatacgttcaataagtttaacagattcaacagcaacatgatcaaaatttatgaaaagatatgatcaatggcacactttttaaagcaaatcacaatcacccctgtgcttagaaaaaaatttttttatcactgatatatttttgcaaattatatgaagctaaattgctatgactaacacggttaggattacgttcgatggtctgcaaatttttttcagcttcttggatgatcctcatgagctcttgatgtcttttattttgggtatctaaatatgcccaataccctaatacaaatacaatactcacgcataacactattaatactttattgatcattattattatctctatgtttttaatgttaatgatcttaacaaaaaaaaataaggttgtgaatactttcacatttatttacaataattattaaccacacaagttattgatataaaaatgttttccaatatacaatttaaaaaattgattaaaaagaaaacttttcacttaaaaattcatttttaaaaatagctatattattttaaatgaaaattatatagactgcttggcccatttttattttgaagtatatttaaatttatcgtttactttaacttcattatattatttattgaattttcatatatttctttcattatttaatagtaaaaagcccaccttaatcaataaggtgggcttttataaattaattaacctgcaacttcttcaactttaggttttacttttacaagatcagcttcatagatgacatcgtattcttctaaatttaaatgatgtaaacgctgtttaagctttttcaatgaccatggccatgctgcaaagttgcgaccatttgcatcaaggtaataactcttacaaccaccactattgaatactgtggtttgtaaatgcttttgtacaagctcattatgctttttaattatttctgattttacagaaagtttagcaatacctttcgctttcatttgcaataaaccatctacaatatattgcagttgggcttcagcaagaccaatgaatgagtcataaaccaagacatttggccctagcataagaaatgcgttcggtacattttcaatattggttcctaagtaagcttccggtgaggagtctttccagagttctgccagacattcccctttttcattatgtacccgtttaccaatgggtggatgggacacttcaaaacctgtaccccaaataatcacatctacttcgtggcgttcgccattagctgcaatcaccgtattgccttcgactttaaccaggccatgtggaataagcgtggtattggatgcctgtaacgctggatagtagttattggcaaataaaatacgtttacaaccaatatcaaaattaggtgttacgtttttacgtaaaaccggatctttaatttgtaactttaacaattgtttcgcagcaaaattgacaggctttaaagcttttgggttgcgtaaaccaaaattgatgacatttaaggcacctgctacagtctggcgccaagtggcctgtatttttgggtatttggcaataattgatttactcaactcccccaaatccgtatccggttttggcagtacccaaggggctgtacgttggaatacaaacagttcttttgctttaggctgaatttggggcacaaactggatggcagatgcaccagtaccaatcacggcaatacgttttccagtaaggtcatagtcatggttccatttcgccgaatggaacatttcaccagtaaaggtatctaaaccttcaatgcgtggaatctgcgcctcagtaattgggcctgtagcaaatagaactgttttagtaatatataaaccagagcttgtctctagtttccagacattttttacattgtcccattccgcttttaatagttcggtattgaattcaattaaggactcaatatcaaactcacgactaacatcttctaaatagcttaagatttccggctgacgtgcaaataaatggctccattttgcacttggagcaaacgagtaagagtacagagccgaaggtacatcacaaccacagcccggataggtattttcacgccaagtaccaccgacgcggcttgctttttcaataattttaaaattagttaggcctgcttcatttagcttaattgcagcagcaagaccagaaatacccgcaccgacaataaaagtgtcataaatatgtgcaacttcttgggttttacgggtgcgtgtatttgttctaggtttagtgaccataatttttctgcctatacaaaattttatttaaataactgatacgaaagcccaaggaactttgcatatagcgttggagatgtccttttcataagccagaataatttggcgtcgatctgtggcgtggtgtagagctgcccacgatctaatcgattcaatgttaaagttgcaactgcatcgctggtcgtcatggcatagttcatgagtgcatggtctgcaagcttggaataacgccccggaatacgaccatttttaatgatattggttggcaccaaagtcgggcaaagtacattgactttaatattgaatttgcgaagctcggctgaaagggtttctgataatgccaaaacacccgctttcgttacattgtagacactcatttctggtgctgcggtatacgacgcggcagaagccacattaatgattgcaccgtaacctagttttttgaactttggcacaaatgcatgacaaccatgaataacaccccacagatttacatgcatacaccatttccagtcttccaaactcatttcatcaaatttgccacctagacctacgccagcattattaatgatgagggttaccggatgatcaagcaactgctctgcctgatcagccaaagtctgtacttgttctgcttgcccaacatcgcactgtacagcaaatgctttttgtcccaactgttcaattaactttacggtttcttcagcagcttctaaattaatatctgcgcagactacgctgccaccacgttttgccagttcaactgcaaagcttcgtccaatcccactgcctgccccggttacgaccgcatatgcgtttcggctcggctggtctttcttaccaaataaaatcatagtaaatcctaaaaaattttagggagacggcagtaattgtcatattactgccatgaccaataggcttatgaaactgcacgaactggtggtgtaaattccttcacaaagtaaggcgcaattgcaccgccctcgttaagtaatttctttttgtagtactccagatattcggtcgtgtcatgatcatttggatggaagtctggacgtaagtaatcaaaaatctgaccaatggtgctaccaaatacgccatcttttggactaaaaattaagttgacgccacgacgtgcatctttccaaaattttctggtcaacagttcttttggcttacgcagtagaggtacaaataaagttgctgttggaataagccctaaaatggtaatgaaagccattaaaaagcccgttgcccgtaacggataattaccgtttaaaacctgatagacgtcataagcaatatctttatgctcagattcttcaagcatatgccacatccataaggcacgacttttggcatcgtcggtataatagaaattcttttcatgcttcatcatgtattcggcaagtaccgccgtaaaatgttcaatacccgccatgagtgaaagctttaatggctgcgggaattttaagaacacatatttaaagaagttctcacccaagaaacgataaaaatcgaccggatattccagctctttaattgcatcattgaactcattatgcaattttgaatggatggcttcttgaccaatcagcgatgtaacacgctgttttaaaatcggatcttgaataaattcacggtggtgacgagctgtttctatcaccagatcttcaccataggtcaaaaaaaccgaaagcgttgcaaaaaacaaagttgcaaactggttgttgacgtaaaactcgatatcaatttctttaccatcaaatccgatatttaaatggcgaattgggatagttcctttatttgagaaatctatcttttgatactgagctataactgatttaggagaaataatatttcggatagcttgagcgaccattttcgacaccctataaaatttgttaaatacaaggcagcgtcgaatcaaacagctaaagttgtctttggattatttcttgcaatctttaactgctctcaaacaaaaatttgctcgaatacctctgccttgtcatgttttatgaacttaagcgttgttaagttcaccaaatcaggttaaatagtgcgcttgctataacactctaacaaggacaaaaaaagccaatccattttgaaactttttgccaactcaaatatttttcgattattttaaattatttatataacctactattattcattattttttaaataaaatacatttgtcctaaaatgataaaaacatggcttaaaaagataacacacgaaatattctgcctatttctatacataccttagttctatatttgagcgttccaaaaatcacaccaagctttctgtttttagagctttattgcacaaatgaaaacgataaactgcattcagagaaaaaattggatgaggagaataaatcatgtttgatatgcgtttatctcatgagcgtggtgcagcacatcatggctggttacagtcaaaacacacgttttcatttgcaaattattgggacccgaaacaagttggcttttcagatttacttgtaattaatgacgatacggttgctccatcaaaaggctttggtactcaccctcaccgtaacatggaaattatttcttatgtgcttgaaggtgcattagaacataaagactcaatgggtacaggttcggttattgtgcctggtgatattcagttaatgagcgcaggccgtggggttgcacatagtgaatttaatcactctgctcaagaaaacgtgcacttcttgcaaatttgggtagttccaaatgaagtgaacacaacaccgggctatcaacaattgcatatttccgaggaagacaaacgcggcaaattgcacttgatgatttcaccaaaaggtggcgaaaaaactttatccatcaaacaagatattaatatttattcaggtctttttaatggtgaagaaacagcagagttttcaattccagaaggtcgttatgtttacctacatgtggcaaaaggccgtattgatgtaaacggtaaaacctttaataccggtgatgctgcgcgtattcgcgatggaggcaagttatcatttaccaatggtgacaatgctgaaattctgatttttgatatgcgtccggaagaaattccaaccatgccataaatagtaaaaacacctgcgtagaagtatacgcaggtgttttttatcacatttgaaaaactaaaaattatgattgatcttctgagcgtgccatttcagtattgatataactcataatcatagtggttagcccctgcaccatttcatcaaaactaataaatgggttgggtaaaataagatgtcttgcaacattaaaaataccgctattaatacaaatataggtaattacaggtaagttattaatttttaaatatttaggattatgcatcatatacttcatgatgacttccattaaagcctgttcaatttttggaatatatttatcgtattgcaactcacctgcataacgtaaaacggttaagtaacggtcattatttttctttaataaatcactgaacgtataaaaaatcatttcaataacaggttctaactccaactctaaaattgtaggagttagctctttaatcatgtcgagaatttcactcacaaagtagtgattcatcgcatcataaatttcttctttgtttttaaaatactcatagagtgaccccacactcacccctgcaatttctgcaatatgacgtgtagtggtaccacttggtccatgcaatgctacagcaataaaacctgcttcaataatggtatcgacagtgactttggctcgtgcctgacggggttttcgcgtagacatattttcttataaataatccgaacataagctcagattagcatgtaatttagccctaccctaataaaaaaacaaaatccgaatagttgtcaaatttcatgaaatatttcttttaaaactacaatgaaatacagttataagttcttttatgtttgagtatttctttttaattacattaaaatatttaaataaaaatcaatatattaataaattttaaaactaattttttattttataaaaacatgaaactttaggtttagaaacttgaaaagttacccgaattgaatccgaacataaactcagattaacatgaaaaaatctaaaaagaggttaagctttttactgaactttcctctttttcccgttattcagtcaaataatcacacaaataacggagcaacatcaccgtagtcagtaagcagagaaaactgctttttgaaaatggaatttacagtgccctgtttcaaatcaaagcttttggttttcgacgtagccgcactatcactgattgatctgaaggtgtcaccatgatctcgaccacagttaaaaaatcactaaacaaaattaaattttaccgtgaaatcgagttaccggattttgctagtaaaaaatccatcccaatccgtcatttaaatatcggatttgaaggtaaagagattgatgttgaattctatatgaacaatcaatttgccacgatgttttttgctacgctttcagtatttctgacttatggtgaagatctggtgattgaaacagctcgtcatcaccgtgaatttattcaagatccagttttaaaacagcgtgttacttcattgattggacaagaggcgattcattctaagttacacaatgaatataacgatgcacttaaagatgttgaataccctgttgatttataccgtttcttgggcgaaaacttctttaaatatgtgtttttgaaatttccgcaaccgcttaaattatcgatgatggctggtattgagcattttactgcggtacttgccgaatacatgatgaagcacgaaaagaatttctactattcagatgatgccaaaagccgtgctttatggatgtggcatatgcttgaagaatccgagcataaagatattgcctatgatgtatatcaattactcaatggtagctacccactacgagcttctggcttcttcttagcattcttcactattttaggtctaatccctgcgactaccttgtttattccggttttaagaaaaccgcaggaaatgttgactagaaaattctggaaagacgcgcgccgtggtgtaggacttatttttggtccaaaagatggtgtattcggtagcaccattggccagattttcgattatttacgtcctgacttccacccaaatgatcatgacaccactgaatatctagagtactacaaagacaaattactcaaagaaggcggcgcgattgcaccttactttgtgaaggaatttaccccacctgtacgcttgtcttaactggcttgcaaccagtcattacttaatggctggtgttccttaaatctatttcgggatgaatcatgattttatttggcaaaaagaaggttaaaccaagccaaaaagcttatgccgtcgtgacgggtgcaggcagtggaattggacgaagttttgcaattgaactggcgaaacgtggtggtagcgtagtctgcgcagatattaatttagaagctgcagaagaaactgtaacgttgcttgaacaacagggtgcaaaagcttttgctatgcgctgtgatgtgggtgacgctgaacaagttaaccacctagctgaaactgctgaaatcttatttgggcatcctgtgactcttgtcattaataatgctggagtaggtttaggcggtaaatttgacgaactcagcctagaagactggaactgggtcatgaatattaacctttggggagttattcatggctgtcatgcatttgttcccaagtttaaaaagttaggttacggcgcgattattaatgtggcatctgcggcatcttacacggctgccccagaaatgactgcttataacgtgactaaagcgggtgtgcgtgcgctttcagaaacgctttcggctgagcttcgtaaattcaacattaaagtcaatgtgctctgcccgaccttggtgcctaccaatatcattaaaaatggtcgtattccgggccgttattcaaaacttgcagaccatgcgctcatgaactacgcactcaccacaagtgatgatgtagccaaactcacacttaaccgccttgatcaggatgagctttataccatccctcaaatcgatgcgaagttgttctggctgatgaaacgtgcatcaccaagtttgtataccaagttccttggtacctcttacaaattatttaaataagaaattttataggtagtacccatatgactgctcaaatgaaaacaaatgcatcagcaaaaaaagctgtcaattcacctagccatatttacgatacctttattgtcggtgccggaatttccggtatcgccgcagcgattcgtctcgaccaagttggctataccaactataaaattattgaaaaagcaggacgtgtgggtggcacttggcgtgaaaacacctatccgggctgtggctgtgatgtaccgtcagctttgtattcttattcgtttgcgcctagtgcaaaatggagtcacttatttgcgcgtcaaccggaaatcttaagctatttagaagatgtaagtaacgagtttaatattacgtctaaaattgagtttaacaacgaactactcaatgctgcttgggatgaatcacaccatttgtgggtacttgatacaactactggtcaatatctatctcgaactgttatttttgctacaggcccaattaccgaagcccagattccacgtcttgaaggtttagatacctttacaggtgaaatgttccattcagcgaaatggaatcatgattatgaattaactggaaaacgcattgctgtaattggtacaggtgcatctgccatccagtttgtgccccaaattcaacctaaagccaaagaattgtttgtattccaacgtacagctccttgggtactgccaaaaccggatacagacttaggtgagtttagtaaatcaattattgcaaaatatccagcgattcaggcaagttggcgggcactgttgcaaatagtcggtggtgataaacttatcatccccttttgctgatggagctgcacatgaacccattcaaaggccggcattttcagcgtgacatcattctgtgggccgtacgctggtactgcaaatacggcatcagttaccgtgagctgcaggagatgctggctgaacgcggagtgaatgtcgatcactccacgatttaccgctgggttcagcgttatgcgcctgaaatggaaaaacggctgcgctggtactggcgtaacccttccgatctttgcccgtggcacatggatgaaacctacgtgaaggtcaatggccgctgggcgtatctgtaccgggccgtcgacagccggggccgcactgtcgatttttatctctcctcccgtcgtaacagcaaagctgcataccggtttctgggtaaaatcctcaacaacgtgaagaagtggcagatcccgcgattcatcaacacggataaagcgcccgcctatggtcgcgcgcttgctctgctcaaacgcgaaggccggtgcccgtctgacgttgaacaccgacagattaagtaccggaacaacgtgattgaatgcgatcatggcaaactgaaacggataatcggcgccacgctgggatttaaatccatgaagacggcttacgccaccatcaaaggtattgaggtgatgcgtgcactacgcaaaggccaggcctcagcattttattatggtgatcccctgggcgaaatgcgcctggtaagcagagtttttgaaatgtaaggcctttgaataagacaaaaggctgcctcatcgctaactttgcaacagtgccccttggcgttgatggccttgcctgacgcctggaactgctgctgatgcttattcttggcagcgttaaacagcttacccaggatgcggtcgtgcaggtcgatgatttcgtcggtgacggtggccatgccctcggtggccagcgccacgagagtggcgtagcgccgttgcggctcgaatttggccaggtcggcgggtgtcatctggccgccctcgcgggcaatcttgagcaggcggttctggtgaaccagccgctcgatgccggtaggcagatcgagtgcctgccatgccttgaggcgttcgatgtgttccagcatatgccgcgaatttggcttggccggagactggcgcaaccaagccaaccaggtcgtcttgccgttgtcccggcgcttgagcagatcgtcgaggcggcggcgatgcgcgtccgccagtggttcggccaaggcgtcgtagatgcgccggttagcacgggtgatcgcctcggcactcgcccgctcgacggcgttgagggcgggcagaatgaccgactgccgccgcaggtgcccgatcaaggcgctggccagcacgatgcctttgtcggtttgcatcgccagctcggtcagcatctggacggcctgccggtaatggctcatggtgaagggccggaaaccgaacacggtttgcagctcgctcaggtgctcgcgccgggtctgctcccgctggccgtactcgttccagctttcgacgccgaccttgagctggtcggcgaccagcttcaacaagggcgggaacggtagttcatcgacgcccaggatgacgccgggaaagcgcaggtaacagagctgcaccgcgaagcccagccgattggctggcccgcgccgctgtcggatgatcgagaggtcggtatcgttgaatgtgtaatgtcggatcaggtcgtccttggagtccggcaacgccagcaggctttcccgctcggcggcggacaggatggaacgacgtggcatatttactgatccgttctcaagtattgatacagggtttcgcgactgattccgaattcacgagcaagcttggtcttttgctcgccagcctcgacacgttggcgcagttcggcaatacgctcagacgacagggatttcttcctgccacggtaagccccgcgttgcttggcgagcgcaataccctcgcgctgacgctcgcggatcagggcgcgctcgaactcggcgaacgcgcccatcaccgagagcatcaggttcgccatcggagagtcttcgccagtaaaactgaggtgttccttgacgaattcgatatgcacgccgcgttgtgtcagcgtttgcacgatccggcgcaaatcatcgagattgcgcgccaggcgatccatgctatgcaccaccacggtgtcgccggtgcgggcgaagcttatcagcgcttccagttgcggacgcttgacatccttgccggatgccttgtcgctaaaagcgcgatcaaccttgacgccttccagttgccgttccgggttctggtcgaaggtgctgaccctgatatacccaatgcgctgtccagtcatggaattccctgcaaaatgtcagggaagactctatgaccttcaacgagatatgtcaataaattcaaaattcaatcctatcctgacgcaatttacacatggcatctgacatcaggttagggtatgcctcaacctgacggcggcgaatcacaagcgtccggtttgacgctggtttcggtcgcagtgctggcccgcgcctggaagcgctgatagcactccagcccgcagaaatgctccacgtactcggccccttccggcgtgaaggcggcatcgagcgggatttccttgcagcacacgcagcaactggtgctcggttcattggcgttcatggtggtgttcctccattggttgacgaagccgacgaaggccgccgccggcatcggcctggcgaacaggaaaccctgcaccgtgtcgcaacccgcctgccgcaaccacgcaaggcagtcgggtgtttccacaccctcggctaccacctccattgtcgttttcagaagacggctgcactgaacgtcagaagccgactgcactatagcagcggaggggttggatccatcaggcaacgacgggctgctgccggccatcagcggacgcagggaggactttccgcaaccggccgttcgatgcggcaccgatggccttcgcgcaggggtagtgaatccgccaggattgacttgcgctgccctacctctcactagtgaggggcggcagcgcatcaagcggtgagcgcactccggcaccgccaactttcagcacatgcgtgtaaatcatcgtcgtagagacgtcggaatggccgagcagatcctgcacggttcgaatgtcgtaaccgctgcggagcaaggccgtcgcgaacgagtggcggagggtgtgcggtgtggcgggcttcgtgatgcctgcttgttctacggcacgtttgaaggcgcgctgaaaggtctggtctacatgtgatggcgacgcacgacaccgctccgtggatcggtcgaatgcgtgtgctgcgcaaaaacccagaaccacggccaggaatgcccggcgcgcggatacttccgctcaagggcgtcgggaagcgcaacgccgctgcggccctcggcctggtccttcagccaccatgcccgtgcacgcgacagctgctcgcgcaggctgggtgccaagctctcgggtaacatcaaggcccgatccttggagcccttgccctcccgcacgatgatcgtgccgtgatcgaaatccagatccttgacccgcagttgcaaaccctcactgatccgcatgcccgttccatacagaagctgggcgaacaaacgatgctcgccttccagaaaaccgaggatgcgaaccacttcatccggggtcagcaccaccggcaagcgccgcgacggccgaggtcttccgatctcctgaagccagggcagatccgtgcacagcaccttgccgtagaagaacagcaaggccgccaatgcctgacgatgcgtggagaccgaaaccttgcgctcgttcgccagccaggacagaaatgcctcgacttcgctgctgcccaaggttgccgggtgacgcacaccgtggaaacggatgaaggcacgaacccagttgacataagcctgttcggttcgtaaactgtaatgcaagtagcgtatgcgctcacgcaactggtccagaaccttgaccgaacgcagcggtggtaacggcgcagtggcggttttcatggcttgttatgactgtttttttgtacagtctatgcctcgggcatccaagcagcaagcgcgttacgccgtgggtcgatgtttgatgttatggagcagcaacgatgttacgcagcagcaacgatgttacgcagcagggcagtcgccctaaaacaaagttaggtggctcaagtatgggcatcattcgcacatgtaggctcggccctgaccaagtcaaatccatgagggctgctcttgatcttttcggtcgtgagttcggagacgtagccacctactcccaacatcagccggactccgattacctcgggaacttgctccgtagtaagacattcatcgcgcttgctgccttcgaccaagaagcggttgttggcgctctcgcggcttacgttctgccaaagtttgagcaggcgcgtagtgagatctatatctatgatctcgcagtctccggcgagcaccggaggcaaggcattgccaccgcgctcatcaatctcctcaagcatgaggccaacgcgcttggtgcttatgtgatctacgtgcaagcagattacggtgacgatcccgcagtggctctctatacaaagttgggcatacgggaagaagtgatgcactttgatatcgacccaagtaccgccacctaacaattcgttcaagccgagatcgcttcgcggccgcggagttgttcggaaaaattgtcacaacgccgcggccgcaaagcgctccggcttaactcaggcgttgggcaacaagaaaaccgatatgaacgtacgcacttgcactgaatctgacgtcgcctctatcgcagtcgtatttactgagtctattcatgtacttggagcgtctcactatgacgcttcgcaaaggaatgcgtgggcaccgcgtcccgcagatatagaggcttggtcagctcgcttatctggcctacagactcttctagcaattgagggagatgcggttatcgggttcatctcttacgagcttagcggccacatcgagtttctttacaccgcaccgggttccgagcgtcggggcgtcgcgtctgttctgtaccgtgaggttgagaaagccctcccaggtgtttcgctcttcacagaagccagtctggtcgccaagccctttttcctgcggcatggtttcagtgtagttgaggagcaaaatgtctcccgtggaggcgtcatgttccgtaggtatgcaatgcgcaaggcagttgtcgcccaacatggcgctcaagccgaccggccagccctgcgggctgtccgtcggcttagctagggcgttgggcaacaagaaaaccgatatgaacgtacgcacttgcactgaatctgacgtcgcctctatcgcagtcgtatttactgagtctattcatgtacttggagcgtctcactatgacgcttcgcaaaggaatgcgtgggcaccgcgtcccgcagatatagaggcttggtcagctcgcttatctggcctacagactcttctagcaattgagggagatgcggttatcgggttcatctcttacgagcttagcggccacatcgagtttctttacaccgcaccgggttccgagcgtcggggcgtcgcgtctgttctgtaccgtgaggttgagaaagccctcccaggtgtttcgctcttcacagaagccagtctggtcgccaagccctttttcctgcggcatggtttcagtgtagttgaggagcaaaatgtctcccgtggaggcgtcatgttccgtaggtatgcaatgcgcaaggcagttgtcgcccaacatggcgctcaagccgaccggccagccctgcgggctgtccgtcggcttagctagggcgttgggcaacaagaaaaccgatatgaacgtacgcacttgcactgaatctgacgtcgcctctatcgcagtcgtatttactgagtctattcatgtacttggagcgtctcactatgacgcttcgcaaaggaatgcgtgggcaccgcgtcccgcagatatagaggcttggtcagctcgcttatctggcctacagactcttctagcaattgagggagatgcggttatcgggttcatctcttacgagcttagcggccacatcgagtttctttacaccgcaccgggttccgagcgtcggggcgtcgcgtctgttctgtaccgtgaggttgagaaagccctcccaggtgtttcgctcttcacagaagccagtctggtcgccaagccctttttcctgcggcatggtttcagtgtagttgaggagcaaaatgtctcccgtggaggcgtcatgttccgtaggtatgcaatgcgcaaggcagttgtcgcccaacatggcgctcaagccgaccggccagccctgcgggctgtccgtcggcttagctagggcgttagagcaaaaatgaactgcgcacgctgtggccgccagaatttcgtagatgcacatcgttgcgctcactgcggccaccacttctttgacggtagtgacgtggtgaatcttctagacaaggctcagaagcgcacttggttaaggccgcgaaacatcgccatattccttgcggcctgggcgctactggtggtggagatcgtcacctacgcgggtaaagcgccaagttctcctcagggctgggcggcgctcatactgctcgggcctattgtgtacgtcgtactagcaacctgtgcagatacaatttttcgaaagccatgaatacagtaaatcgctcatgctctaaccaatgcttccagccgacgctacggccttacggcctccgcgcgtctgaagctgggcgttaaacatcatgagggaagcggtgatcgccgaagtatcgactcaactatcagaggtagttggcgtcatcgagcgccatctcgaaccgacgttgctggccgtacatttgtacggctccgcagtggatggcggcctgaagccacacagtgatattgatttgctggttacggtgaccgtaaggcttgatgaaacaacgcggcgagctttgatcaacgaccttttggaaacttcggcttcccctggagagagcgagattctccgcgctgtagaagtcaccattgttgtgcacgacgacatcattccgtggcgttatccagctaagcgcgaactgcaatttggagaatggcagcgcaatgacattcttgcaggtatcttcgagccagccacgatcgacattgatctggctatcttgctgacaaaagcaagagaacatagcgttgccttggtaggtccagcggcggaggaactctttgatccggttcctgaacaggatctatttgaggcgctaaatgaaaccttaacgctatggaactcgccgcccgactgggctggcgatgagcgaaatgtagtgcttacgttgtcccgcatttggtacagcgcagtaaccggcaaaatcgcgccgaaggatgtcgctgccgactgggcaatggagcgcctgccggcccagtatcagcccgtcatacttgaagctagacaggcttatcttggacaagaagaagatcgcttggcctcgcgcgcagatcagttggaagaatttgtccactacgtgaaaggcgagatcaccaaggtagtcggcaaataatgtctaacaattcgttcaagccgacgccgcttcgcggcgcggcttaactcaagcgttagatgcactaagcacataattgctcacagccaaactatcaggtcaagtctgcttttattatttttaagcgtgcataataagccctacacaaattgggagatatatcatgaaaggctggctttttcttgttatcgcaatagttggcgaagtaatcgcaacatccgcattaaaatctagcgagggctttactaagcttgccccttccgccgttgtcataatcggttatggcatcgcattttattttctttctctggttctgaaatccatccctgtcggtgttgcttatgcagtctggtcgggactcggcgtcgtcataattacagccattgcctggttgcttcatgggcaaaagcttgatgcgtggggctttgtaggtatggggctcataattgctgcctttttgctcgcccgatccccatcgtggaagtcgctgcggaggccgacgccatggtgacggtgttcggcattctgaatctcaccgaggactccttcttcgatgagagccggcggctagaccccgccggcgctgtcaccgcggcgatcgaaatgctgcgagtcggatcagacgtcgtggatgtcggaccggccgccagccatccggacgcgaggcctgtatcgccggccgatgagatcagacgtattgcgccgctcttagacgccctgtccgatcagatgcaccgtgtttcaatcgacagcttccaaccggaaacccagcgctatgcgctcaagcgcggcgtgggctacctgaacgatatccaaggatttcctgaccctgcgctctatcccgatattgctgaggcggactgcaggctggtggttatgcactcagcgcagcgggatggcatcgccacccgcaccggtcaccttcgacccgaagacgcgctcgacgagattgtgcggttcttcgaggcgcgggtttccgccttgcgacggagcggggtcgctgccgaccggctcatcctcgatccggggatgggatttttcttgagccccgcaccggaaacatcgctgcacgtgctgtcgaaccttcaaaagctgaagtcggcgttggggcttccgctattggtctcggtgtcgcggaaatccttcttgggcgccaccgttggccttcctgtaaaggatctgggtccagcgagccttgcggcggaacttcacgcgatcggcaatggcgctgactacgtccgcacccacgcgcctggagatctgcgaagcgcaatcaccttctcggaaaccctcgcgaaatttcgcagtcgcgacgccagagaccgagggttagatcatgcctagcattcaccttccggccgcccgctagcggaccctggtcaggttccgcgaaggtgggcgcagacatgctgggctcgtcaggatcaaactgcactatgaggcggcggttcataccgcgccaggggagcgaatggacagcgaggagcctccgaacgttcgggtcgcctgctcgggtgatatcgacgaggttgtgcggctgatgcacgacgctgcggcgtggatgtccgccaagggaacgcccgcctgggacgtcgcgcggatcgaccggacattcgcggagaccttcgtcctgagatccgagctcctagtcgcgagttgcagcgacggcatcgtcggctgttgcaccttgtcggccgaggatcccgagttctggcccgacgccctcaagggggaggccgcatatctgcacaagctcgcggtgcgacggacacatgcgggccggggtgtcagctccgcgctgatcgaggcttgccgccatgccgcgcgaacgcaggggtgcgccaagctgcggctcgactgccacccgaacctgcgtggcctatacgagcggctcggattcacccacgtcgacactttcaatcccggctgggatccaaccttcatcgcagaacgcctagaactcgaaatctaacgtccgttcgggcatcgaggtccatgtcggggtgggacgggcccgtggcttcaagatcacttgcagtccgaccgcgatgtcttggttgcgcgagaggttgtcgatatcctccacttccatcatcaaccctggataatgccgccgccgtcatcgccgccgacgcccgtgccgggcttttcgggcctgtcaggcttgctcggccttcagcctgcctgggcgagatctccggcggacggattaacggcggagcttcgccgcctttcgtgcgtgtgaaggccgaagatagttctctcaaaaacatccgtttatgagagataccaaatgtcattttcagaagacgactgcaccagttgattgggcgtaatggctgttgtgcagccagctcctgacagttcaatatcagaagtgatctgcaccaatctcgactatgctcaatactcgtgtgggctctgttgcaaaaatcgtgaagcttgagcatgcttggcggagattggacggacggaacgatgacggatttcaagtggcgccatttccagggtgatgtgatcctgtgggcggtgcgctggtattgtcgctatccgatcagcggcactgttgcaaagttagcgatgaggcagccttttgtcttattcaaaggccttacatttcaaaaactctgcttaccaggcgcatttcgcccaggggatcaccataataaaatgctgaggcctggcctttgcgtagtgcacgcatcacctcaatacctttgatggtggcgtaagccgtcttcatggatttaaatcccagcgtggcgccgattatccgtttcagtttgccatgatcgcattcaatcacgttgttccggtacttaatctgtcggtgttcaacgtcagacgggcaccggccttcgcgtttgagcagagcaagcgcgcgaccataggcgggcgctttatccgtgttgatgaatcgcgggatctgccacttcttcacgttgttgaggattttacccagaaaccggtatgcagctttgctgttacgacgggaggagagataaaaatcgacagtgcggccccggctgtcgacggcccggtacagatacgcccagcggccattgaccttcacgtaggtttcatccatgtgccacgggcaaagatcggaagggttacgccagtaccagcgcagccgtttttccatttcaggcgcataacgctgaacccagcggtaaatcgtggagtgatcgacattcactccgcgttcagccagcatctcctgcagctcacggtaactgatgccgtatttgcagtaccagcgtacggcccacagaatgatgtcacgctgaaaatgccggccttgaatggttggttcatgtgcagctccatcagcaaaaggggatgataagtttatcaccaccgactatttgcaacagtgccagtccgagaacatgctttccatggtctctgagctcgcctttgggaccgacatatcggtagagagtgacgcgctcgatgccgagttccttgcagagatcggaaactgaagtatcgcgctgggccatggcggcttgcgcgagacgcacctgagctttggtgagcgcgaattttcgtccgcccttgcgaccgcgcgctctcgcggaggcgagacccgccatggtgcgctctcggatcagatcccgctcgaactcggccaaggtggcgaagattccgaacaccatgcgaccggacgcagtcgtggtgtcgatctgagcgccctttccagtcagaacccgcaggccgatcttgcggtctgacagctccttcaccgtgttgaccagatgggcaagcgatcgtccgaggcgatcgagcttccagaccaccagcacatcgccgtcacgcaatgacttgaggcaggcagtcaagccagggcgatcatcacgaccgccggaagcaagatcatcatagatattgtcccgttcgacacctgcggcgcgcaaggcgtcgtgctgcaggtcgagagactgcgagccatcggctttggagacgcgggcatatccgatcagcatgtatcacaaacgttggtttgaggcggcgcttcggccacgattgcattgacctctggaaatgtatctcaaccagcttcggggttcaaggtccaatgatgtaaaaaaccacgctaagaggttaattcattgtttgtattgaaatttaatggtcttaactcgcccttcagaatatcttccggtaacgaaaacgtataatgccccagcatatttatatggccatgtatcagcggcgataatcttgccagatgctcctcttcaggtgtttcccccgatttgcgaagatgtgacaacgcctcctgcatgtaaagtgtgttccacagcacaaccgcattggtcaccagacccagagcaccgagttgatcttcctgcccttcacggtagcgttttctaatttcaccacgttgtccgtagcaaatggctcgagccactgcatggcgtccttctccccggttgagctgagtgaggatccgacgccggtaatcctcatcatcgatatagttgagaagatacaacgtcttgttgacccggcccacttccataatcgcctgagccagaccagatggtcggctacttctcaacagtgaacgaataagctctgatgcatggatggtcccaagcttcagtgagcccgccattcgcatcatttcatcccattgggattctatttttgacagttcaacacatccccgggccagctcattcagggcaccataatgtgccgttttatctgcccgccagaatatcgccccgcctgcatcggccagacgaggggaaaactggtagcccagtaaccagaacaggccaaaaatgatatcgctggatcctgccgtgtccgtcataatttctaccggattcagcccggtctgctgctccagaagcccttccagtacaaagatggaatcacgaagcgtaccgggaacgacaatgccatggaaaccggagtactgatcggagacgaagttgtaccaggtgataccgcgtcctgaaccaaagtatttacgatttggtccggaattaaccgttttaaccggtgtgacaaaacgcataccatctgcggaggcaacctcaccacctccccagtaccccgcgagcggcagcgtggactgaaaatcaaccagccgtgcattagcgctgaccagcgtttctgccctgagataattttgtttaacccagctcagacgatggcgagtaagcgcgggaatattatgctttatcaggggttcatgccctatattgcaggcttctgccagcagtgttgcgcacagactgacctggagatcctgcgcccgagcacctgattcactgacgtggctgaattcgcgggtaaaaccggttcgggcatctatttcaagcaacagctcagtcagatcaaccggagggatcagttctcttacccgacgattcaattgtatcagtgccggtggctcatccagtttatccagactgctaatcgtcagtgagggatgcttaccttcattgcttatgctgaccgctgcgttgcaggcaaaacgtgaagccactgatttccatgtgtcatcaagccgcgtagccagttgttctgctgctttagttccgtctgatggatgacccagcgcccgacataccgggatgcgttgtgcctgccattcagctccctgaagcaatttttgacgcgggtccccccaccggtcactgttctccagccagagatcacgacggcgcaaagaatcttgaaggcgctcgagaagacacagcgagtaacccgctcgtagaatcctaccatctctgtcgtagaccagacgtttccaggggccggaaatgatttgctctggtgcatcgtcgagaattcgcttttttgagccactcagttcggccagataatggattgctgacaacgtgtgctccccggccggggcggcctgaaagtgtaagtcacgcaacatcgcggacaggaagcgcttcacccgtccatattgttccaccatttcatcctgaaaatgagtatcttgcgggcgcgccagctcatttaccttgccgacggattcagccagtttgtcctttggtatgcggcgaaaaatagcctgccgcagagctgcttcatcggtgttctcatcaagtaataacgtgcatgcccgtgccagtaatagcgcggcacgatcaagatctttaagggtcctgagccgctttttctgcccgatattttttgcagaacgcgtgatatccagaataagcatatccagcacatccacggcctcgtcaagcgccgaaatttcctgtgctttcacaaacgcagtaagcacggccagtcgccgttcgtcaggcattcttgaaatgtatttcaccgaagccattccggcataacgggccaaattccgcagctggatggcaggcagaccggagaaattcagccgggaaaactccatgctacgcagtcgggtatatcgctccagggcgtctgtaaatgacggcccactgatagtgacaggaccttttcgcatctcttccagcaccgacatacgctgcccttcaggtatttcaagtaaaccgtccagttgtgttttctgccagctgtcaggcaacaaagccagccttcgccataatcgtcgacttgcccgttcgcgtacttcgccaatcagccttgtcagagtcgaggctgcgggtagcaggatcttattttgcagcaaccatgcggtagcaaaatcaaacagcagacctggacgctcattgctgagccaggcgcgagtatagagcaaacgcttcagtctgaatgaccaggggaaatcaccaaaatcatgataatcataatagagcttgataagcccctgatgctcccagcgggtattgtctctttcagcataccgggaaaggatctctggtcggctgatgttcaactgtgccgcaatgtaaaaacggatgaatgagggaatttgaaggagatcaggaagaaacgttcccagaaagcgcgccgtagtcagctgaagggcactgttgcaaagttagcgatgaggcagccttttgtcttattcaaaggccttacatttcaaaaactctgcttaccaggcgcatttcgcccaggggatcaccataataaaatgctgaggcctggcctttgcgtagtgcacgcatcacctcaatacctttgatggtggcgtaagccgtcttcatggatttaaatcccagcgtggcgccgattatccgtttcagtttgccatgatcgcattcaatcacgttgttccggtacttaatctgtcggtgttcaacgtcagacgggcaccggccttcgcgtttgagcagagcaagcgcgcgaccataggcgggcgctttatccgtgttgatgaatcgcgggatctgccacttcttcacgttgttgaggattttacccagaaaccggtatgcagctttgctgttacgacgggaggagagataaaaatcgacagtgcggccccggctgtcgacggcccggtacagatacgcccagcggccattgaccttcacgtaggtttcatccatgtgccacgggcaaagatcggaagggttacgccagtaccagcgcagccgtttttccatttcaggcgcataacgctgaacccagcggtaaatcgtggagtgatcgacattcactccgcgttcagccagcatctcctgcagctcacggtaactgatgccgtatttgcagtaccagcgtacggcccacagaatgatgtcacgctgaaaatgccggcctttgaatgggttcatgtgcagctccatcagcaaaaggggatgataagtttatcaccaccgactatttgcaacagtgcccccataaataatccagtaccaattgcaccaccgattgcgatcatttgaatatgacgatttgtcaatgagcgctgcaatttctcttcttcttgctcagtcatatgttgactgccaagaagatctccttccaggaattgttttccgttattcttactcatgtaatatttactccaatttatagcaaccgtcgtaaatgctttaataataaataaattatatgattattaatttagtccattaaatcatgttaaaaatattattaaatcatttaaaactttataaattcctttttaaaagctatcacctataacaataaaaattattcatcattcctttccttcattattatattagcctgcatttaaaaatataattttgaaaaattaataaaatatataaattaattacatattttattgaattatcttttatataataaaacaggctaattaatcccagctcagcgagcaagatcgtatttatccatatacccctcttgcgctagcgataatatagtattccttcttaaatttggtgaaatgtatagtatttctgcttaattaacagccattcgcaaatgttctgtttctttaattttgttcactatctgtgggttcgagtcctgtttaacatggacgcttaacacacggactaaaccaccattttcaacttttaattgttttgcttgtgcttttgttatttgcaatgactcctgataaggtgtgccaaatacaagaattgctcgataattttcatagttatcgttggccacaatatagggttcatcacctaaactaagaggaatagactctacaacttgtacagttaaaatctggctttctttaattgctcttaaattttcaatatctgcttgcagcgttgcaccaccatcaaaaatatctatatagcctttgtagcgtagtccttcttcaagcaagagattgtaggctggtcgagtattgggatgaacaataccaatcgcggctttagcatcatcaggcagcatatcgacatagaggggatgtctcggcatcaactcagcaataaaagccttttgccccactccactcaaataatcggctttggtaaattcaatattaaaaaacttatgccctaccgcattccaaaatggtgattgcccatttgcatcagaatagccgcgcatttcagcaacaatcgtttcttcgaaatattggcgaaaggcagagagaaacaagaaacggactttagataaaaatttgccatttttatttaagcgatagtcaggatctaaaaataaagtacaaagctcactacagttagtatgatcattactcaaatacaaagtaggtaaagcgttataaacacttaagggttctgaagcatgaacttgggttcctacatggaaattgtaccaaggctcttttaaaccaagtgcgacttcaattccgcaaaccccgacaactttgttgagttcagtatcttctaaaacaaataagtaaacctgatctgcttttgggagttcgcctgcgactgtcttacacgcccgttcaatacgtgcagccaacttttccatatttggctgcaaagatgtcaaaccaaaacccgctttttgagccaacaggtaaaggtcattaacatccctaggttcgatgtagcgaataatcatcatgctgcttgttcatccttttgaagttccacaaagcgagcaagcgcacgttcaaagcgttttaaaccttcatcaatatcagcaaatggaacgattaaagaaggtgtaaaacggactacatttggaccagcaatcagactcaataatccttcttcacccgcaaggttattaatatcttttgctttaccagcaaactcgtcttttaaaacacatccgagcaataaaccactgccacgaattgctttaaagacttcatatttttcatttaattgatttaaagcttttttatagtagtcgtgacgctctttaactccattcagcacttcaggcgtattaataaactcaaagactgcccctgcaaccgcacttgctaacgggttaccaccataagtcgtaccatgtgtgcctacagaaaaatgcggtgcgaacttatcagttgttaacattgcaccgaccgggaaaccaccgcccaatgcttttgcagtcgtaagtacatctggaatcacaccgtagttcatgtaggcataaagtgcacctgtacggcccacacccgtttgtacttcatcaaaaataagtaaggcaccgaactgatcacacagttcacgtaaaccttttaaaaattcgatatcagccggaataactccgccctcaccttgtacaggctctacaattactgcacaagtttgttcatttatgactgctttagctgcttctaaatcattataagcaacatggctaataccgtttggaagtggtgcaaagtcttgtgaatattttggctggccgcctgctgaaacggtaaataaggtacggccgtggaaagcattgttaaatgccacaatgccacttttacctgcaacaccgctgtcgagtccaactttacgcgcaagttttaaagctgcctcattcgcttctgcacctgagttacagaagaatactttatcggcaaatgtattttcagtgagttgtttagcaaggcgtagtactggttcattggtatagccattaccgacgtgccaaagtttttttgcttgttctgttaacgcattgactgccactggatgcgcatgacctaatgcatttactgcaatcccgcctgcaaaatcgatatattctttattttcttgatcccagatacgtgaaccttcaccacgtaccggaatgaaatttgccggtgcaaatactggaaccatccactcgttaaagtcaccacgagaaactgcaaaattattcatcttatctagtccattaaattgaattattcgggttaactgatgaccttattattcaaaatcaaattgattcacaaaatttgtaattcagtaaaaaatgaattattttttaccaatctgataattgacaattacattatggacaatattgatcaaattattttaggtttacttaaagataacgcacggatgtctgtaaccgaattagccgaaaaagttcacgtctcaagagcaacgattaaaaagagaatggagtatcttgaatcttcgggcattattaccggatatacggttcgttttaaaccaaatgcggaacggaatgtcattcgtgcatggatgagcattatggtcgaaggcaccaaagcgcagtctgtgattaaagaactacgcctagaaagtgcggttgaatgtctgcataaaactaacggtaaatgggatattctggttgagctacgttccgacactttagaaaacttcgataaagtattagagagaattagaaatatttcaggtatttataacagtgaaactagtattttacttgctagccataagacctaatcactgcgttcaaacttaaattaaacatggggtgagccaactatacggctgagctcatccattccctttcattcaaaaatttctctatcgccgctcgttaaatctaaaagtgccatcctcatgatgaacctattctaacaatcctcaataaatttttaattttttaaataatcaaaatcaaaaacttaaaatctaatttgatttaaattcccactttttcactcactcccctcatcaaagcatttgacagaaaatttaaaacataatacatatagtattatatgttatatgttaaaacctaaggacaaggtataaaaaatggctaaaactcaactacaacacttcattaacggcgaatatgttgctagcaaaggaaatgatttcttcgatttggtaagcccagtcactggtgaagtctatgcacaatcgccgaatgcgaccgaggcagaagttgatgcagcttatgctgctgcaaaagaagcatttaaaatttggggacgtagtacaccttcgactcgtcaaaaagcattacttaacttggcagatgccattgaagcaaatgctgaccgtttaattgaagcgcaaagccgcaatacaggtcagttaaaacatttaattgcatctgaagaagtaggtgcatcggcagatcaagttcgtttctttgcaggcgctgcccgcttactcgatggcacagcaactggagaatatttagaaggtttaacttcttctattcgccgcgaaccagtcggcgtggtcggccaagttacaccttggaactatccactcatgatggcggtttggaaaattgctcctgctttggcagcgggtaatactgtcgtattaaaaccaagtgacacaactcctgaaagtacccttttacttgcagaaattgctgcaccattttttccgaaaggtgcatttaacgtggtgttaggccaagcgcaagtcggttcaaaagttgtatcacacaaaacccctgctcttgtttcgattaccggttcagttcgtgccggattacaagttgctgcttctgctgcggcaaatttagcaaaagcccatcttgaacttggcggtaaagcacctgtactggtttttgaagatgccgatcttgataaagccgttgaaatgattgctttaacaggctatttcaacgcaggccaagactgtactgctgcaacacgtgtgattgtggctgaatctgttcatgacgagtttttagctaaactcgttgaagctgcaaaaaatacacgttttggtgaacctgatgaccaagatgcactttatggtccacttaacaatgccaatcaattaaagaatgttaaagcgtttatcgacaacttacctgctcacgccaaagttgaaacaggcggaaaacaggcagaccgcccaggcttctattttgaaccgactgttattagtggcctaaaacaacatgatgaagctattcaaaatgaaatttttggaccagtgattaccgttcagaaatttaccgatgaaaatgatgccattgaaaaagccaacgatgttgaatatggcctagcttcaagtgtttggaccaaagaccatgctcgtgcaacacgcctgtcacgtgaacttgatttcggtacagtttggattaatacccatattcctttaacagcggaaatgccacacggcggcttcaaaaaatcaggatatggtaaagatttatctggctacggttttgaagaatatacccgtgttaaacatgtgatgagttcaaatgaataataacaatacgttttgaaaggagatcaaaatgaataagcaagaaatgaaagacttggtgactaaagcccatcatgagctctttaatttgcatgacaccactgctctagaccgttatttttctgaagactttatagaacactcgccactcgttgcaaatggtatttcaggtcttcgtcaattggtagaagattgtcccgatatgcaacacgaagctgtacgtgtactagcagatggtgacttggttgcaattcatggccgctttcaaggcttagatgaaaacccattggttggttttgatatttaccgagtaaaagacggcaaaattgtcgagcattgggatggtcttgtggcagaagctgcaccgaatgtaagcggtagaactcaactagatggtccgactgaaatcgtaactcaccatgacccagagaaaaaccgcgagattgtgacgtctttcttcaagaagtcattaatcgatggaaattatgaagcctttaaagaatataccgacggcgatcagttcattcaacatagtccagatattggtgatggcgttaaagccgtgattgattttttgaacaatatccgtaatgaaggacaaggtttggtatactcaaaaacgcatcgctccattgctgatggtcaatttgtattgacacattccgaaggcagtattgccggaaatcgacatgcctattttgaactatggcgtgtagataatggcaaaattgttgaactttgggatgcaatacctgctgtgcctgaagatgaacaggctgtccatggttatggcgtgttttaataactatttatccgcttcattaagctaagtcttttgacttagcttttagagaattcgccatgtcagcatatacgataatttttgcacctattgctcaagcaactcgttcggaacaagttgtagaacgcttggaaaatgcaattatctctggtttgctcaaaagcaatgaacaacttcctaatgaagcagacttagcacgcttaatgggagtttcgccaattactgttcgcgaagcattaaatactttacgcgtaaagggtttaattgatacacgtcgcggaagaaatggtgggagttttgtttgtgagctaccttcggatttacttttaaatcaacatcctttgcgccaagcttcaaatgagtatcttgccgatttaggcgagtttcatagtgcaattttaagtcatagtgcctatctggccgctcaaagaacaactgaatacgaacttaacaaaatcaaagagttgattgatcaatttgaacaagccgttgaagcagatacacgtgcacagcttgatttacgttgtttactcacactcacctcatttgcccaatcttcaagactggcaaatcaggaactcacgattcaggctgaatgggctccgctcattgccgtgctttatcaagatgatgattttcaccgtgaagttgtaaagcaatatcaccatcttttgtcgtcttttattgacaacaatgaaaatgaagctgttattcaagccagaagaatagtttcaatgctcactgaccaaatgcttcgatataagttatcgagtgaataaaaataagaaatgagatggcttattaatacacaagttaggaatatggaattttaggagttataggaatgacccaacatttagatgtagaagaacttcaaaatttgttaaagacggtggttgacgaaacaacctctattacggaaacactcgcaagtaaagcaagtaaaattctgtcaaaacacgcttctgaaaaaaatgcagatattaagctttcaacttcagaacgcgctgctttgcagaaagaaattaaaaaagcactctctcagagccattatagtcaaggtacgggttttgcaagttatagtccggcaactcaagatgagcaagactattggacgctagaatggtggtataaaaaagaagatcaattacaacaagcgaaacttgaaaactaccaaaatgcgcagcgctttttagatttccgctcatttgagtggttccataaacctgcacaaaataaaagtccatgcatacatggtccttatgtggattatatttgcaatggtgcctataccattaccattgctcaccctgtcatgattcatgaccactttattggcgtcattgcgaccgatattttagtttcggcccttgaaaaactacttatgccaaaactcaaaaatattaagcaaaaggcggtcattatgaatgattcatctcgagtcattacttcaaatgacattagcatcagaaccgggacattatttaaagataagactgatcaacagtttttctcgcaaccctgtcagtctttccagttggttgtcatctaaaaagcaaagaatattggccttttattcccgctttagtgtaccaccaaggtgatatagcactttaagccctagctgttgttcaaactttcttcaaacagacttgtttattcaggtctaggggaagttttggcctaaaaatagcatcgcctttctggatgaaaagcaaaaacaacgaaatttgaggttgaaaagacatggaaaataaagcgtcttccttaaaaaaactatcgctatggcaagtgacaattattggtattgcctatatgacccccatgacggtttttgatactttcggtattgtttccggaattaccaatggtcatgtccctctcgcatatttacttgctttaggtgctatgttgcttaccgcttggagctacgcaaggtttagccaaaattcggaaaaatcaggctcagcctacagttatactgccgaaagcttaggacccaaaagtggtttttttgtcggttggtgctctctactcgactatctgttattaccactcatcaatgtgttactggctgcaatttatctcaccgcactaattccaagtttgccttattggttttgggtgctggtatcggcgggccttgtgactttagtcaactgtttccgtattcggttacttgccaacttaagcctcgtgtttgtgttcgcacccattatcctcatggtcatttttgtatatttagtggtccggggtattggctctactcaaggttacgaacatgtacttaccttggctccgctatggcatggtcaacaatcactgttaccacttgttgctggggcctcagttctatgcttttcattcttaggttttgatgcggtcaccaccctttcaaatgaaaccaaacaacccaccaaaaatattccccgtgcagtcatgttaaccacacttgctggcggagctattttcttcacagccgcttggtttattcagctttattttccaaataatgtccgttttcaccatccttcagaagcgttaccagaaattgtgctttatgtcggtggtgctttgtttcagtccatcttcttatgcggacaaattatgaacactgtcgcctctggccttgcctcacatgccagtgcttcgcgtttactgtatataatgggtaccgacaatattttccctaaaaagtattttggaaccatccatagctctttaggcacaccctttttctcggttttatttgtcgggcttatttcaatgtcggctattttcttagatttagctcaagttgtcagtctgatcagttttggtgcgcttgttgcgtttacagccgtaaacttctcagtttttatgaaattttatattaaagataaacaacgctcaggttttaaaaataaatttctaaacctatttttaccgctgttatcggtcatcagcattatttgtttatggctcaatctcgactcgtcttcactgacttttgggtgcttctggttggctttaggcattctcctattcatttataaaacgattaaaaaacaaagtattgcaattagtaatgcttattaattttttaaggaacttcgtcatgaaaattatttctaaacctcaacttttaaaagatgtggaatacaaaccaagtcagtctttacaagtgggtaaagaatggagctggttaaatccaaaacacgcgaaatttgacgcaaccacgattaacggcacttcggtagataacccagcaaactactatgaaagttccctctcgaattggcatacatttgacagtttaaatgctgacatcgagtgtgatgtggtggttattggtggtggcttattaggttcatcaactgccttacatttagctgaacaaggtgtagatacggttttattagaaaaaaatcgtattggtagtgcagcttcaggtcgaaatggtggacaactcaccccaggtttagcacgttgggaagctcaagaaatggccgaccgactcagctacgaagatgccaaaaagctatggcattttacctctactgaagcgatgcaactgattgatgatatctctgaaaaataccaactcaactttgaccgtaaatacggccatatcactgccgccgttcatgagggacatttggttggcttaacacaaggtgccgatgcccgaaaatacttaggtgaagaccatacccgtattgtgggtaaacatgaactcatggactttattaagtcagactactatacaggcggtttaattgatgagttaggtggacaaatccatccgttggctctaaaccgcggcttaatttatggtttttgccaaaacggcggtactgtttatgaacaaacagaagttatttcaatagaagaaaaagaagatggtatttatgttcacacagcaaatgcagtcgtgaaagctaaaaaatctgtagttctggcagtacaccatgcctcgtttaaacttttatctgaacagaacaataccactattccattttatacctatgtcgcgaccaccgcccctttagagcttgataccaaagagcttctgccatttggacatccggtttatgacactcagttccagattgattactaccgccctgtctttaataaccgtttactgtttggtggacaaggtacaggaacatgttggggaccagagaaaactctaaattatctagagcatcgaattcataccgtattcccgcaaattaaaaatctagagatggatttcgtctggagtggaactaccgatttaactgttaatggtgcagtcgatagccgtaaatttggcaacaagttcccgatttatgcagttcacggctggagcggtcatggcgtagcgcagacagtacgtattggtaaagccattgcaaatgactttattgggcaatcgaatgactttgaaatgttatctaaaattgaccatcaaaatattatttttggccgtacgcttgcccctgtcgttattccactcgctaaaagtatgtatggcatcggagcaatgattaacccaggcaaaatggtttctttctaatttataaaaacgtcattttctaaaaaagattcgtacagttttgtgcgaatctttttatatcaaagcaatattcattttcaaactaggttatcccttttcaatctattacaataacgccggcttctttattcagcgcatagtattttgagtaactcatcttcccaactaaaacgtggacttaaaaatcgtcacatccagttaatcgctatgggtggtgctgtgggcacaggactatttttaggctcggcacaagtcattcaatctgctggtccttcaatcattttgggttatgccattgtcggtttggttgcatttttaatcatgcgccaaatgggtgaaatgattgtcgaagaacctgtagtcggttcttttagttactttgcacaaaaatactggggaagatttcccggttttttatcgggctggaattattgggtagtgtacattttggttgccatgaccgagcttaccgccgtggctaaatatgtacattattggtggcctcatatacctgcttgggtttcagttttatttttctttgtactggtcacttgcttgaacttaggcaatgttaaattttatggcgaatctgaattttggttagctattattaaggttgctgcggtcatttcaatgattgtatttggtttatatttactgcttaccgcaggtaatgactctatagctagcttttcaaacctatggcagcatggcggatttttccctcatgggttctcgggcctgttttatatgctcgcctttttaatgtttgcctttggtggtattgaactcattggaatgacagcagctgaagctgaaaatcctgaaaaaagtattccacaagccattaaccaagtcatttttcgaattttggtattttatgtggcttcactggcaattattatgtcgcttattccatggaatcaactggacctcggcggtttagataagagtccatttgtcatgatttttagccaactgggcattggttgggcggcacatttactgaactttattattttaactgctgccctttctgtttataacagtgggatgtatgccaatagccgtatgttgtacgggctagcagttcaaggcaacgcacctaaagtttttgcaaaagtaagcaaacaaggtgtacctacatccgcggttatcttttcttctattctaatttttgggtgtgtattacttaactatttcataccagaagaagctttaagctatcttatgtacatggctgtagcagctttggttttaaactgggcaattattagttttacccatttaaaatttaaacgttcgatgaagcttgaaaataaaattgctaaatttcctgcactattttcacctttgagtaactatatcgttttgacttttattggcatgattttatatatcatgtggactcaaggctttgaaaagtcggtgattattattccaatctggattgcttttatgtttgggttatatacaattttgagttggaaaaaatcactctaatcttcaaacaaggcttattcaaacaagataagcctttattattttggggtttacaaacaatttgccttcagaacaaaccaatcatgccatatgcctatttctaatttaattcacaataattaattctgagatattttatgtagtctttattcattctaaaacaagcaattaagtcatactcaacagatcatgattaaaatacaagtgtttacatgatctataattatttgtgcttatgttcagctaaaatcgaggctgacaaagtatattgttgcgatgcccttctaggaaaaagacacttcatctaacccagtgctttacccacttatagatttcgcgctatttactgcgtcgctcaatgatgaaagacaggaaaattttatggaaaaaacactgcaatgtccgaaatgtggttctacagaaattgaaacacgtgatcatgacaaattacttaaaaccactggcggtgttttattaacagctgcaggcactacggcaggtactgtaggcggcgccgcaactggtgctactgtaggggcagcgattggtactgttgccggaccattaggtgtaattgttggtggaactgtaggaacgtttgtcggtgcaatcagtgcaggcattactggtggtgtggtaggtaatatttttggtaaaaaagcaggcgtaatgattgataaaaatatatttcaggactatcgctgcttgaaatgtaaataccgttttaaacagaagaaataaccctatttcattaagcttatttttaaagcacgttcatgactttaaaagataggaaagccactatttaggttgctttcctccctctcttatctcatcttattcaaagaaaaaaataatctaataactaactattaccgatactatattttatgagtagactataaaaatcagtcatttactttacgctattcataagatatgaaagaattgtggcctcatataacttttgaaatttaaaatgaaaaaattattacttttaagcttaattagcattttcagctcacatagttttgcagaggacaatagctcgatttatcggggacttggtactggtcctgaagattttttaaattttcaaattcttaaacaaaaaggtttcctagccaaaaaacctaatgtttcaagagtagactataacgatatatacaaactcaaaaaaccttatgaatttatgggacaaaacgttttgcttatttcagatgaatatatgtctgaatatgtgggctgttgtgtgagtgaaggttggggagctgtatttaagcaaaccaccaatttaaaattaattgaaaaatttgcaaaaaagaatcaatgtaatatcgctccgatagaaaccgatagcacttactatgggtttaaaattagttctctgccaaaaggtaattactatgaattatcatgtcgcgaacgtgacttggctcagtctgaatagataggaattaactgttaaaaaataagagccaaacaagttgtttggcttagaattttaatagtaaaaatattgtttaaaaagcctctttaataaaatatttatatttttatcatcttataaatttgactagaatagctagtttacaaaatcaatagtaacaaaaatgttattccagctagttatttaaccaagaaatcattcacacaaatcattcccccacttatagtaacgatacaaaaccgtattaacattatagttagttattttcaactccccgcctttataatcttgaatcttgccaaaggttgggttgactatattaattttgttatttggacctaaacaatatgtatcaactccctgcccttgcccttttaacacctatccatctttatctaaatacctgactattttatctaatttcctagagtctttagtaaattcaaaataagaaacttgtgcttcatatttatttatagaatctataatttcaatattatcgcctaataatgctttcatcttcacttcaaatggatatttatccgcaggctgttcatacactccattagaacaacccacctgtaaaaacaagaaaaataatgctatatatctgaataaattactcacacaaatcctcaccccatttattataggaatataaaacagcattcacagagtaatctgttcgttttaatttcccacctttaaaatcataaagtccaccagaagttggtataacaacattaattctattatttctccctaagcaataattatcaacgccctacccttttcctttcaatacccatccatatttttctagtaaacttactctactttcaattttattattacttttaggtaattcaaaatatgaaatttgtacctcagccttttttaatgagtttataatttttatttgattaccaagtaattctttcattttattttcaaatggatatttatctgaaggtggttcataaacactactgccatatccgactaatagtaaaatagtagtaattccaaaactcaatttatttaatttcatatttcaaactgataactcacccaatttaataaatgcgataatccgccattaattatcgcatttccatttcatatttagtataaatatcttttccacaagttataatatattactttcaaccaacctattaattattcattttttctaaataaataccagcttcttgattcccagataattttgctttcttaaaccattcttttgcagtttctatatttctttcaactccctctccatttaagtacctaattcctaattgaagttgactatcagcatctccttgtaaagcagatttacgataatattctacagattttgataagtctttttttacaccataaccattaaggtacattattgctaaattatattgagactttgcatcactctgatcagcagctttttgataccaattaatagcctgtttataatcaacatttaaatcatactcaccgaatagatatgcatcacccatttgtgactgagcacgaatatctccctgttctgctgcactttttaaattttcgaattcagaatttgctgaactatcagggatattacaccctactaatatactgaatataaagatatttaaatatttactcataatagactcaaattttaaaaaatactattaaaaaactcattttcaaaagtaaatctagcactccttaataccaacaacaatttcaataaaaatattatatttaattaactatatattgttcttagtttatataaaatttatctaaatttagaacaatttaataaatatttattagcagctacattctttttttataatttctatatttttggccgcctcttgatctccttgatcagcagcaatttgaagtaattcaattgatttactaatgtttttttctacccctctcccttcatagtacattccagcaagtattttagcggcatctccatcttttccatttataatagccttgttataccaataggcagccttttcatagtctaaaggggtcccttcgccattaaaatacatattgcccaaattaaactgtgcacttaagtcacccaaaaaagcagctctattaaaaagattaaaggcattattactatcctgctctacaccaactccatccttatacattcttcctaaaaaattaatagctactctattatcttttttcgaaagttcagaaaaagtatctaatgccttaggaatattagtatatttagttccctctgtataataaattatacccaaattagctttggcttcctcttcaccttgttcggcagctttttcaaaccaatacaccgctttatctaagttaaccttattaccatttaatccttgttgatatataacacctatattgtattgagcaactgggtcaccattttctgcatctttttcatatttacttaactcactattggagcttttgacttttatattagaagaatcacatcctaccaaagttaatgtactaaatataaatattgataagaaaattttcatattatctctcatttaaaacatgccttggtttggaaatcaagtggatgatagcccattttggaaggagcctcaggaattcttggagctggcggtaatttatgatcaacagttgactgttggctgttggctttgtgaagctttgaaattatattctcaatctttagtagtatgtatatgatcataaaactattcttattattaaaatcagtaattagatagattataattttctatagatacaggcatatatattttattaaaattgatctatgaaaatccttctttttgaaacgttgttttttcgtttatgttactttacgttgcaaattgagcaagtagaattcttgtatagtaaattaacacccattaatctatccgagataaaagatgttatcaaaaaaaatttttctaactgtttgtcttttaagtatcttaagttcaggttgtgcaaaatctgtcaatcaagctaatgacaataatgaacaacagcactctaatcagaataatatagataatattaatgtaaatgatatccgatcaaaagctgaaaagggagatccggaagcacagtacaatttaggtgtaatgtatgcagaaggatataaagacattcaacccgatattctaaaagctattgaatggtacactctatctgcaaatcagggttatgttaatgctcaatataatttaggtttattatacatgggaaatgagcatattaaaccagattatgctaaagcaaaatattggtatgagaaagccgcagtacaaggtgatattccatccttaaacgaacttggaaatttctacagtaaaggcttaggtattaagcaggactatcaaaaggctattaaatactacttagatgctgcaaatgcaggtgattcagatgctcaaacaaatcttggcaccatgtttttacatggtagaggagtaactcaaaacaaggaagaagcttctcaatggtatttaaaagctgctatccaaggagatattgatgcccaatataatttagggcttatgtacttactcggagatggtataaaacaagattatcctcaagcacaaaaatggtttttggcagctgcaaatcaaggcgaaagcaatgcacaatttcatctcgggaaaatatataaagacgggctaggagtagataagaacttatccttagcccgtacctggtttgaaaagtctgctgaagcaggaaactcatatgcagctcaagaattatccaagatgaactaatatctttatatttagacaggtttctctttaatatgttgaagggaagccatgtgctcccaaatcccaactatgaccaggaccatgaataatagatgggccatttggattaccaaccatttctttaccttgactaatagtaatccctctcgctttactttttgacttatactcatctttataaatataagggcttattttatcagtgtgtgagcccgcacagtatttagattctcctgttgctgcacacccttctatataacctctattaacctgtctttccccataatggtaattacgttcaaaaaccccatactcataacctaaacctacttttcgttccattgttaaggtactttcaccattacctttataattagcgtaaatcccaacaccaactcctgctgtcgctgagccgcctacagatttccctgctgcatatctttcagctacatcttttaaacttttacttgttgcatacttttcatatgtatctgatgctgattttacacttccatatgaaccaatcgaattcgtcgatgcaagcccacgcggatctatccattgagttggatcacttacataagcagaggtattaattccgccactcaaaccaatcgggtctttacttacatatcttgcgctatgaggttcataataacgataacggttatagtgcaattctgtttcttggtcgtaatactggccttgaaagcgtaaattattttgttcaaatggattatcttgatttagtgctttaatttgcgacaccgcgccccatgtgtcttggagaatttcccatacacactctcctcggatattagtcatggtttgtggtgttccgacctgatcacaatggtaaaatgtgatttgctctaaatcagcacgctttttccgagtagtactattccatactgggtctttataaatagaatatggttttgtttgatattcctgataatcaggagtttctatcagttgaatgaaatccttataacctgtttgtaatagtggaacaaagctatcaggttcataaatatagtgctttgtataattggtctgtgcagatttaaaagactcccatatcattaaatctccatcccaaccaaataaggttaattctttggctgtttttttgtagagtcgacgaccaaagacatcgtaaccatattctgtaactagaccattattatcacttcgaataagtctgttttgattatcccaagtcagtttaaggtttttgcccgcttgaataatctctgtcacattaccttgaacgtcatattggtagtgtttacctttataacttttaataaggttatttttaatttgtgcaggacttaataccgagtcagaatcaattaagttacctgctgggtcaaaattaaagctttctgttttatgtaaactttgagctgcaattaaacgcccaattgggtcatattgataattgagtttacccaaacggctatcttcaacttgactaagcaaatagtttttatcgtagtgatattttctatgtgcttgatattgtaaatagtcttgagtttcttgctcaggttgaatgaactgtgaactcaataaccccacatcattatattgtttggtttgcatgagcccatttgctagtaatcgtgttgtttctctatgcaaatcatcacgctgaaatgaaacaacctcttggttatttaaaccaattgcataaatatgccctgaaccataaacaagatgattcagtgtatgtccatcaggtcgaattgttttaattaaatttccaagctcatcatattcataatgtaatactgctgtgagcggtttcagttctggaattttataatgctggtgctctctaaccaactgcccaagtgcattgcgatagaaatcaatttggctaacctcattactggctcggctcagttggctattgaggttatagtcaaattgttccgtttgtttctgccctgtatgtaaatgggtaaagcttttcgaagcaatttgtccatctgcataataatcaaattgggtcagtatatttggttgacggatttgaaatatccttccgttctcattgtaactatagtgcttttcctctccatcaaaggcctgttcacgtatcaaatatccatacggattgtatccaaacaaatattcggcttgattctggttgattagcttttgaatgcgaccttgtttgtcccattgataagctacactatgtcgattggcatcaatacgctgctctaataagccaacttgattgtacttatattccgttactaaacctttggtatcggtatgtttaagtaagcgtccttcttcatcatgttcaaagtattcttttaacccatcaggataaataatactttgcagctgtcctttatctcggcctttgatactgtaaaaatactgtacaactttattatttgcagtttgttcagctgtcagtacaccatcttcatcatattcccatgtactactcttacctgagcaatcggtatatgaaatcatctgccccaattcattatactgaattttcttaaccccaccttttgcatcaatgacttcaaccagttgattatcattgttatatttgtactgtgtgatatgccctaatggattgatttccttattaagattaccattttcatcatattcccgtttccaaatactgccttctgggtctttaatttcaactaagttatcctgttcatcatatgcaaaacgtattactccgccgtttggctggacaattttaacaagttgatcttgatcattatattcctgttgagtctctcgcccttcaaaatcaatttgtcgagtaatgcgctttttcccatcacggctataccatgactcacgcccatccgctaaacgagttcgataagtaaacccattgaggtcaaagtaatagtaggttggtacatcataggcgttataaaccgccacttgacgtaagcgcgggtgccattttagtttggtatggaaactaccatcatccgcccattcttctactgctttagctttggcgtctgttgattcataacgaatattctgtccacgccctgtacggtctgtatagcgtgttagttgatgaaagttgttatattcataagttcttgtatagccattctgatcaatagctttaattaagttcccttggatatcgtattcataacgtgctaatggttcggctttatcatctaaaaacaccgccataattttaacttgctcattaaaagcaaattttaattggtgtttggcatgctctaactgaaaaacaacatattgaagataagcaaccttttcaaaaataagataacttaaatcaattttttcttgtgttttttcattgaattgttgaatcaattgataaggctgtccgactgaaaactgatgaaattgaaaagtccagtctcccccaaagtttagaaccagatctccatttttaagaggttgtattgttattccctcataaggcacttcatatgtttcaaatgtaatggaagctggcagttgatgctttcgccctttactatcaataaatagatagcctttggcattttgttgaatcatattggaaaatggcatcatccaacgtgcaccgaccatactttgatcaaactcatccatttgtgagttatattgccgtgtaaaagaaaaacctatttttggtaaatagaagtctgcatgttgaacccgttcagcaccaattgaatagctaatactttttccagattgtgaatcagcaccttcacatggaggagcatttaaagcatctgcctgcaaacttacaaattctaaagtgtctcctttcgtatgccgttcatattcacccgtctggttgactggcacacttgcattacctttattttctaatgcttgtatagctttcagtgtttcttgtaatagccatgccaaagtatatttttggccagcatttgcttgttgctgtaaagtttgacttaaagccgcaatagcttgagttgcttcttgttgcaaacgacttgttatatttggttgtattttaggggttaaatttgcttggctcggcttccctaataaatcaatgagtggaacagcccagttggtaaatttgagtttcggatctcgtttttctgcacttgcacctgccgcagtggttattcctgcatttatacctgttgctggggtcgccatgctttgtagaatggttacacccaatgttgtagcgctagtaagtaaactgcttaacttcgcttgagtctcttttaagaagttctctagatctccagcgatcatcgcattgagatgtaaacctaaacgcttaatatccgtttctttaatttttccattttctcgatataagcactctgccattaagccaaacatcggacgtaaagccattcgtgcatgtgcttcattattcggttctgaaaataaaccaattaaatttgccgcaagtaatgccccacgttgtacagcagcatcaccagtttttttatctgtagcatagagcattagatctagtacactacccgtcaatgcaaagatattagcaactgtggttatattggccttactttttatttgttctaatgaggtgtttccacacacttgtaaataacgctgaacctgacttgcgaccatttgcaagtccgctacatccgtcacgctatttaagttaaaaacagcaagttcaacagcaggttgttttttaatttctttctgttgtgtattctctttagccatcaatataaaacctttaattcattcaattgcagcaatatttttctaagttgaatcgctctattcatccaaactacttttttgaccgtacaaaagtatctaaatcgccctgctgaataggtgactcttgatttgtggtcttaaataattttgcggtcatttgatcactcaaaaaatctccgccctgctctttaagcatttcaagagattgacttggattcgtcgccatttgaccaagacttttcatttgatcggcagataaattgagattaagttgttttgaaacagtattaagggcagtattagttacctgatttttaatctgggctactgtttggccagctaaattatctaaagtattcttacctaagtttttgaaactatttttatccgttgaaagaagattattttgcaattgagacatcgtattttgccccactgcttctagggcatttttcattaatccttgaacacttttgactggttcagcccacgtataattacgtttaaaatcactgctttgtagccatgcacttgtattatccttctcaaaaactactttagctggtccgggtgcaatacctgttacttgtgcaaaaccatttccatcgagtttgcccgtaatttgcttacctaatgaatcaatgactttatagctattttgcttgaagaagttatctccaccataactccgcagtagctccaatgctccctgcataggtttagctttaggcaactcaggagcactggcgtttgcactcgctcctcccataaacaaatgctgtccagcattgacttggaatttcccaccagttttcggaaagattcctgaaccatttagagtaatttgcgatgagccgcccgtgattttgacttctttcgggctactaatgatgaccttgtcatcggttgatgaaatagtaattccaagtttactcagtacatccagtgcatctgcctgagcttgtatttctaccttgccttgtgcagcaacagcttttagcccgctctgagcagcaaaaaggctgagcctattttgggcatgggcaatcacattcttttgagtacttatattaatgctatctccagcaatctgattaatttgtgcatcagccgagatgtgaatatcttctgaactacttagagctataccatccggtgaactcaaaagaagtaaagctttttcgaatttagcgatttgctgctgaatttgtgaggcaaaatcttttaactgttcaatcgattcgatttcatcggttttctggtttttagcaatgtcactcagtgctttactgttagtttgactaccttcaagttgctttttcgcaacttcggcatcgaggtggtctcctttggcgttatcctgtttatgggtggataccaataagccttgcccagcgcgcaaagctccccattggtccgtacgcagttcaaatccttctccacggtcttcactttccgctttatctttaggatggctcaatttcccgaggtttaactgacttgcaccatgactgctttgtagctgagtactaatttgtcccggtgtatcatcaaatctgagttgcccaaacccaccacctgacacctctttagaacgaataccacttagctttttcgtatcgggaagcttacctttgttatcaaatttagttggatgacgctgtgcctcatgcactcgacccatcacaaacggtcggtcaatatcgccattaaagaagttaataacaacaatttcaccaatacgcggtaaaaaacgtgcaccgtaaccttctccagcccatggcgttaaaacgtcaatccaagctgaatcggtgtcattattattggtccctgcgcccccatcatggctatggtcatcactacgcgtaaataggaagcggactttaatacgcccccactcatctacatagatttcttcaccttcaggacccaccactttcgcacgttgtggatgagcgactgggctatgagtctgtgggttataagctggtgttgttggaatataacgacgttgtaaaattaactgattcgcttgacgctcgtcggtattactcgcttgccaatcgctttgttgaactaaagtttggatttgctggtttaaatctttgggtaaattattttggttataataattcttacctatgattaaaaactctttatctgtgctttcatgctgatcaatttcagggtgttcattgagttcaaaccaatagccaacttgtgtatctcgtactgtggtttttgcaataaactgcttagactgagcatcataataagcacttaggttctggttaaacttttctagttgttgattacttgctgaggttgccccatcttcgccatttaaatcctgcatccatgccggactaaagtgccatgcttcttcaaggcttaagctttgattgtcgtagttagtactatgctgatgtttactttggacactacctgccccatctgtttgttgtaatacgtctggctgccaacgctgcacaaatatagaagtcggctgtaaactgcgatcagccattaggctggtcatgctatcaaattgttcagttgcactactgcggtggtaacgaatcgctcttcttgtcagagcttgatattggttattatcatcaataagacgtaatttttgtggctgaatattgtccatattgctcgccacggtaagctctgcttcatcaatgagccagctaataccttcactacgccataagcgagttaaaaagtcatagtcgctttcattgagctgcataacaaaaggacggacatcgtaggtctgtttcaagccgctcaaatctagagtcagactagaagcaaataatgggctttttccttgccactcttgaaacagaatttcactaatttctttcacactcttgttcataaacacacggctatttctgcgtttatgccagagataagttggatcacttatagcaagtttatataaagttaaagcaccatcactttgcccttgtgatgctccagtaataatacctgtagtacggaaaaaacttcctcgatctgttacttgatcaacagcaacctgcaccccaataaatgttttgagtggaatatgagcattggttgataaacaaatcagctcggctgtcatgccctgattaagataatgttgcccatctatacgttgtaaaaaaacctgactattcagggatgcatctgaaaactggagatacaccgaacgatgctgtgagagaaaaccaaaactctctaagatctgaaaaatattattaaacatcacttattttataaatttgagttgcaatcgactatattttataaaaaatagacagatttgtctatcttgtttatattaacttcagtttcaaccttagtcttacaactattttataggaaaaaaatataatactaaaacctgagtaaattatgctaatttgctataaatcagagttaaaattaaaaattatcgccaactgaaacaagtaagaataaaaacctaaaatcatatgctgtgcaattaattagttttcctctctagcgtactggcataaaaaaaccgctccaacacctcatccctctcactcaaactattggtacttaaaaacccaaacatcaaaccatctattaggtttaaaaccatatcggcatcaggttttaaggcgcgagtttccaaactaaaaattaggtcaaaaaattctcgaattagccattttctatactcgattgccatacggtaagcctgaggatatgtccctttaatttcaaaaaaggctttaagtagcaaatgatacagactgttagagttaacatgtagaactactatttccttgagcttaacggttggcgtgcagtaacggtttgagtaaataatcgcgagtacttcttctttcagcaggctcttttgaaaggcgatacatatttcaattagaccttcttttgagtgaaagtagttatagagcgtagctttcggaatttcggattttttaacaatcagatctacacccgtggtgtgaaatccataggtggtaaataagtttatagccgtacgaataacgtgtaattttttggaagaggtttctaaatttggcatagttttaccgttataaattcttgttgtttctaaatgagatacttttttgggagaaaaaaaggcacagcaaagccatgaagactgtgcttggcacatctcaagttttattgttgatgcaagttttttgagccgtaatgacttaaagcatgaaaaccctacaggtgatcaagctgctttaaattgttaagttgtgtcgttatagcttttggcaaaggctgccaagaaataatggatgtgcaaagccaactcctttttattgggagttctgccaaaacatttaaattaaggtggcagaacgaaagggggttagcagactggccgaaaaaacccagcacacccgaaggtgtccccctcccgttccgccgtagagggggcacgagggttcgtcactaaaagattgctcttttaatgcttttcggaacggtctgctaaaaccgactggcaatgtggccagcatgcgaagaatagtattccaccctcttgtagtcaagcacacaaaatgacatttgatttaaattagatcattaaaaagtaaggataaataatgaatgagttattgttaaagtagggtttataaagggattgaaatttatatagatatattagtttcaacaggtaagattaaaatataaaaatggaaaaccatgaaatgaaaatatctttattagatgtacaacaagtattcaatgatctattaaaccataaaattagccgtgaggatgctgaagaatgggcaagaaaaagaatgaatgcactggataaccaagacttaatttttgatcctccaattaaagaggagcttctttggaaagcggtaatatatttaagtggtgttggattaaagatatctcctgatacgtacatggaggatgatattggtattaaagaaatgtttaatacttattggaatcaataattttttcgcgaaaatttatacttttataatatcaaatgattaaagtacaacattccaaataaaaaaagctaaaccccgataaccgcgacttagctttaaaaaaataattttaattaaaaattacttatttgatgtctgcaaattcagaaacaggcttgttcacttcaacttttgtgcctccaaatttttcatttacaaacttttgaactttaggtaagtggtaaagttcaccaagcttcgtatagatcgggtcatttttgttcgcttcagcaacacccaataagttgacataaagcttagtagactgatcgattggctcacggaagattgcgtctttcattacattgaggccgccctcaagtgccaatgtattaccgagtacaatcgcatctacatcgtttttaacacgaactgccgtagtcatttgaattggttttaattgtaagtttttagggttttcagcgatatcattcactgtcccttttacagggtcaaaacctggtttaagtttaattaatttagcagactgcaataatgttaatgcacgagcttcgttagcagtatcgtttggaattgcaatggtagcgccttgcgggaactcatcaacggttttaactttatttgcataaatacccattggctctaggtaagttgttgcaacagcagcaactttagctttatttgaagcattataagctgccaaatagttgaatgactggaacgcatttacatcttgttcgccacttgctacagacgtattgagcacaacatagtcagttaaattggtcacttcgagtttaatgcccgcttgagcagtttcaggaagtgttgctacgtatttccatacgtccgtatcagaacctgttgaaaccagtttaattgtacgaactgactcagttttatctttggctgctgtattttcagtttgtgcaggttgcttattacatgcagtaagtgtcagtacagaggcactgaacagtacgctaaataattttttcataaatatatcctaaaataggaaacgcctcccctaaatcagagagagacatttccaaccattgggtcgaaatgcaatatttggctggatataatttccagatatagggtttagaagcctgatttcagcatcattccttccgtgaatttgcacgctgaacaatagaattatgttttgaaacagtttctaaatatggcctcatcatatatcaataaatgaatattctacaaataacttgttcgattctgatatataggccacttattactaagatattgaaaacaaaaaatatattatataaaatatagatttttgattaaaatatatactcgattgatttatatgaaattttcggcatttattagcaagatttaagctaaatgaagttgtaatttttatccttggcttaaaaaatcttcggtttcacaaagatttttgaatttggcggaagcgacaaaatttctcattagcaatataagctatttatataaattattttttattatttaaatttttaataaaaataaattttataaagatatattctattagctccaaggaaggtgaatagtatgaaataaatgatgtagaaaacttccagttcaaattagtgttactactaaatttaaaaacataataatgcatcaatatctctttaaaactattatgtaaatttcttgcaataattttttgtttcacacaactcagtgaaaggccataataaattattgtttgctttttatcctatttatttcaatttataaaaaatatataatattcctcaatagttttctaattatctattacattcattcatgatcatatattttcaagaaagagaataaaatgcaagaccaagctttgccatcattccctcaagatttaaatgaggatcaaagtattacacgtccaccaatttcatactcaggtattcatcattttaaatttcacggtaatgcctcagaatattttggaatttggatcgttaatattcttttaactattattactttaagcttatatgcgccttgggctaaagttcgtcgtttacgttatttctatggaaatacagagttttttgaacgtcgttttgattttactggtattccaaccaagattttgattgggcgtttaattgcattaggaatttacgtagcattttcaatttcatcacagtattcaatgattgcaactgtagttggaatagttgtgttatatatggctgtgccttggctaattcgcgctactttacgttttactgcaagaaatagtaagtatggtaacgcacgcttttattttggtggcactataaaagaatcttataaaattttccttttaagtatattggtatatatctttacattaggaatttttacgcctgtagctatttggctatataaaaaatattatcttaatcacctatatgctggacaattaaattttaaattaaacgcgacctggactgcatatatggctgcagtttatgtacccatttttattgctcttggcatcattgctatcttttcaattatttattttagtattttaggaacactttccgggttctcatcgaattctgtaatctttgggatatttatgatgtatgccattattggattatttatttatccattaattgctgcgcgtcttttcattactacatggaacaatactacagttggaaacagtcaatttaaaacagactgtaatcaatggcgttttgcatggattgtagcatcaaactgggtagtaaaaatcttaaccctaggtttaatgtctgcttgggccgctgttcgcattcacaaatatcaggttgaatcaatgagcttaatcttgctagatgatccagataaaatgatgaatctagctcagcaagaacaaagtgctttagctgaagaaatcagtgatatttttgatattgatatctccctataataatctgagtttaataatttatgtcccaagcagtagatatcattttctatgatggcatagtgtctaaaccataccgtgctcagatttcagctcaatctaaaactgaagttctgattcgatatggtgagcaattagaacaacagcgtcattatcaatatactgatatgaaattgattggtgctctgggacagttacatccagtaattgaattagatgatgatgcacgaattgaatttcatggtgcattacctgaatggtttaattattcaactaaaaagattcaacattcgatttggaaatttgaacgttctccaagtcttattttttttagtttaatttttgtgattactttcggaatcagtttagtaaaatggggagttcccgccacttcccattatgttgcttttaaattaccagagaatagtttaaagaaactaggagatgaagccgagaattatgtactaaataattggactgcacccagccaattagctcaaactcaaaaagaccaaattactaaacaatatttgaatactgttgctgaaaataaaccagccaaattagtgttccgtaaaggtaatcgattaggggcaaatgctgtagcactacccaataatacaattatcattacagatgaactgattcaaatagcccataataatcaagaaatattgggagtattagcccatgaacaaggacatttagtttatcgccatagtttacaacaaggattaactagtttaggactaagtgtattatacattgcaatgacaggtgataattcagatttatttacgtcattacctgctgctatgcttggtgcaaattactcacgtaaatttgagtccgaagccgatctatatgcattacagctgatggataggaaaaatatagaagtctcacactttgcaaatttcttacaacgtttaaacgataaaacagaagaagatctaaataaagcaagtcagtccacctcaccaacctctcaaaaagaatcttcagataataagctatctatagctgttgttgatgctttatcttctcatcctgcaactgaagaacgtattcgaatggttcatgattttgagaaaaaacaacacgctaattattaaatactagaagaattagtattcagacttaagaaattatgaaatataaaattaaactggaaatctaattctacccaactcaatctaaatttttatataggggaggatgaggggtaaaataatagatataaaaaaagcccctgcttttaacaggagcttttcgaatttggcggaagcggtgagattcgaactcacggaggactcacaccctcgtcggttttcaagaccggtgcattaaaccgctctgccacgcttccatgtgcgtaagaatacaaagcttattcattttattcaagaaaaaaatcatcgctttgtgttcaagtgcatattgtttcatcaattttacagttgggcagccaattctgctccttctttgatcgcacgcttggcatctagctctgctgcgagctttgcaccaccaataatatggtagttcgcgatcgtcgactcaccttcttttggcatcaagtcttttaccgactcttgccctgcacacaccactaccgtgtctacacgtaaaagctggtcttgaccattatgttcaatccaaagcccttcatcggtaactgctttatattgcacaccacgcaacatacggacaccatgctttttaagctgtgcacggtggacccaacccgaagttttgccaaggccaataccaagtggtgtggttttacgttgcaataaataaatttcacggattgctggttcaacgactggcggctgcattcccccttcagaaatgtagtttggatctgggtctacaccccattcacgttgccactcggctaaaggttgaggctgtggttgatgtggaggtttaagtaaaaattctgagacatcgaaaccaataccacctgccccaatcactgcaacttttcgtccaacttcagcaccctctaaaacttgagcataagaaaggacttgaggtgaattacttccttcaatctttaatgcacgcggcacgactccagtcgccacaatcacctcatcaaaaccttcacgttcaagttgttcacgattaacacgagtatttaaacgaacatctaccccagttttttgaagttgtactttaaagtagcgaatcgtttcgtgaaattcttctttacccggcacaacctttgcaaagttaaactgaccacctacatctgcattggcttcaaacagggtcactgcatgaccgcgacttgcagcaacagttgcagcagacataccggctacaccaccacctacaacggcgatacgctttggttgtttggtttttaaataaaccaattcagtttcatggcctgcacgtgggtttactaaacaagacacacgtttatttttaaatgcatgatctaaacatgcttggttacaggcaatacacgtattaatttcatctacacgattggtcgcagttttatttacccaaaaagcatcggccaataaagggcgagccatttgaatcatatctgctttgccagttgccaaaatctcttcagcagtttcaggcatattaatacggttagacgcaatgactggaattgaaatatattgttttacatgagccgtataatcaacaaacgcggcacgagggaccgaggtgacaatagtcggcacacgtgcttcatgccaaccaatacccgtatttaataaagtgacacccgctttttctaaagctttcgcaacagtaaccacttcttgcatagtgttaccgtcatgcacaaggtcaagcaacgataaacgaaaacagataataaatttttcgccaacttttgcgcggatcgctttgacaatttcaactggaaaacgcatacggttttcaatttcaccaccccaacggtctttacgctggtttacatggcgacttaaaaactggttaattagatatccttccgaccccataatttcaacgccgtcgtagcctgcctttttggcaatgtcggcacactgtgcataatcttcaattgtactgagaatatttttttcagaaagttgacgtggtttaaatggtgaaatcggtgattttattgcactcgaagacactacaaatggctggtaaccatagcgccctgcatgcaaaatttgcatcaaaatttttgaaccatgcttatggacggcgtgagtcactaaacggtgctgcggaatatcaaataagctattcatggttccgccagccggagccaaccatccttgacggttcggagaaataccgccagtcacaatcaaaccaactccacctttggcacgctcttcaaaataagctgccagttttgggtagttaaaaaagcggtcttctaatcccgtatgcatagatcccatgaccacacggtttttaatggttgtgaagcccaaatgtaatggttttaataaattggcgtaacttgtcatgctgcgtcccaatatttttttgcaacttgttgcatagtactttaatacttttttgataattttggatgaccaagaattattttttatttgagattatggtcaatctataaatgaagcagataatcccatatttttctttaaataataaatagccatcagaacaagtgaattaatgctttttttgccaaaaaaagcaccatgaatagtgctacaatagccgccattcagaattctcgagaccgcctcaacggggtctttttcataaatgttaggattagcaatgactgataatgcaactatcttgcagcatgtaccagtaggcaaaaaagttgggattgccttctccggtggtctagacacttcagctgctttattgtggatgaaacaaaaaggcgctgagccttatgcatatactgcaaacttaggccagccagatgaagatgactacgatgcaattccaaagaaagcagaacaatacggcgctgtgaaagctcgcttgattgactgccgcttacaattggcgcttgaaggtattgctgcaattcagtgtggtgcattccatatcagtacaggtggtgttccttatttcaatacgactccactcggtcgtgcagtaacaggtactatgctcgttactgccatgaaagaagatgacgtaaacatctggggtgacggttcaacttataaaggtaacgatattgaacgtttctatcgttatggtttgttgaccaacccaaaccttaaaatttataagccatggttagatcaaaactttattgatgagcttggtggccgtgcagaaatgtcacagttcctcatcgacaacggttttgactacaaaatgtcaaaagaaaaagcgtactcaactgactcaaacatgttgggcgcaactcacgaagcaaaagatcttgaatacctaaatgcaggtatcaaaatcgttgacccaatcatgggcgttgctttctggaaagaagaagttgaaatcaaaccagaagaagtgactgtacgttttgaagaaggtgtacctgttgcattaaatggtcagcgttttgacaatccggttgagcttattcttgaagcaaaccgtattggtggtcgccatggtttaggtatgtctgaccaaatcgaaaatcgtattatcgaagcgaaatctcgtggtatctatgaagcaccgggtatggcccttcttcatattgcttacgagcgtttggttactggtattcacaacgaagatacgatcgaacaataccgcattaacggtttacgtttaggccgtttactttaccaaggccgttggttcgactctcaagcgcttatgcttcgtgaaactgcacagcgttgggttgctaaagcgattactggtgaagtaacacttgaacttcgtcgtggtaatgactacaccatcatgaacactgaatctccaaacttaacgtacgaagctgaacgtttaacaatggaaaaaggtgattcaatgtttacgccaatggaccgtattggtcagttgactatgcgtaacctcgacattaccgatacacgtgcaaaactaggtatctatacagatgctggcttgctttcaattggtcaaggttctgctgtacctcaattagacaataagaaaaaataatttcttataaggtcaaaaaagccacctctataggtggcttttttatttaaagttaagttaggcaatttcggcaacttgtaacggttgataataaatttggttccgtccgagttgctttgcccgatataaagcctgatctgccgcatgaataagcctatcttgtcccatctttagcccacccgtatatacggtaaaccctaaactgatagtgacatacttcgacactaaagaagctgcgtgaggaatcgcttgccgctcaatggctttatagatatttgcagccactgaataagcaccctgtgcaggtgtttcaggtaaaagtacaacgaactcctcgcccccataacgcgcaacaaagtcgacatgacgaattgagtttttaattgctgcagcaatgctagagatgactttatctcccatctggtgcccgtaaaaatcgttatagtttttaaaaaaatcaatatcaataaataaaacagctaaaggacgcttctcttgatttgctcggtagtagaaaaaatcaaacatctcatcaaatgtacgtcgattcgaaatttgagtcagggcatcctgctggcttaaatgcaataactccgacgcttcaatccgtaagatctgttcattaatttcagcaagctggttatttaaaaaaaggcttctttctcttgagatgagcatactgctaatcgagaaacctaaaatacaactaccgaacaaagcacgacccagtgcaatatagtcacaatttacgtctaacaaaataagaaaagcaaaaactaaaaatgctgccaataaaccaacacaaagcatatgcaaaggtttaataccgcttaatatgaacccgagcatatataaaaatgaaagaagcaacatagactggttcttaagcgccatatttccgacactaagcaataacatcgcattaataataatggttaaaaatacaatgccacatgcagctaaataaaagtgctcggagagttttgtaaatttggcaaaaacccagaacaataacagggcaagtgcaatattcattgcactaagtaagcaatgaataaagtccaaagtaatataaggtaccccaatcactaaatagtcggtcggcagggccaataaaataaaaattaaataagtgagtacaccacttgctagaaactttgaaatgttctgtctagttcgatcaagatttaaacaccagaattttttttccagttgtttgggcaaaggcatattggcataacgatgggtatgtagagtgaccaaatactcgatttcttctttagatttgagtaattgatgtacatttcccctattcgccactagtcgattcctacatattctgcattaacaaaatataacattattttttaaagctccctgcgctttattttgccatttgtccgtaattctcgttaccattttcacactttatcgattatcatttgttttatttcgaagtttgaactgccttgaactctattaccctgctccagccagatgattggcatgcacatttacgtgatggtttagcattaaaacgtactgttccagatttggctaaacaattcgcccgtgcgatttgtatgcctaaccttgtaccgcctgtaaaaacagtagaagaagctttagcttatcgcgaacgcattcttgctcatgttccggaaggcaataattttgaccctcgtatggtgctttattttactgaccacacttcaccagatgaagttcgtaaaattaaagaatcagaacatgtaaatgcgattaagctttatcctgctggtgcgaccacaaactccgataatggtgtgagtgatattcgtaaagtttatgcagtcattgagcaattagaagagcatcaagttccgttattgcttcatggtgaagtaactcacaatcatgtagatatttttgatcgtgaaaaacgcttcctagatgaggtattatcacctctattgaaacagttcccgaaacttaaagttgtgcttgagcacatcactaccagtgatgcagcacactttgttttagaacaagaccgtaatgtggcggcaacaatcactccacaacatttattatttaaccgtaatgatatgttggttggtggtattaaaccgcacttttactgtttaccaattttaaaacgtcaaacacatcaaacgactttgcttgaagtggcgacaagcggtaatcctaaatttttcttaggtacagacagcgctcctcatgcacaaaatgcaaaagagaatgcttgtggatgtgcaggctgctatagtgcaccaaatgcaattgagctttatgcacaagcatttgaccaggtcggtaaattagagcgtctagaaggttttgctagccattttggtgcggacttctacggtctaccacgtaatacttctaccattactttggttaaagaagataacctcgttccagaatcttttgattatttagataatcaaaaaatcatcccgctgcatgccgggaaaacgctgcaatggagaaaagtgtgacacaagaaaactctgtcccggtcattggccaacgttttcgtggcttcttacctgttgttgtcgatgttgaaacggcaggttttaatgcccagacagatgcattgctagaaatcgcatgcattccgattgtgtatgatgcgcagggacaatttgtccctggtcctgcatttcatgcacatattaacccttttgaaggggctaacctcgaccgccgttcgctagacttcattggtattgacccattcaacccaatgcgtattgcaatggctgaagatgaaagaactgctttacgtcgcatttttaaatcggtcaatgaagttcgtaaacagcaacattgtactcatgcagtactcgtaggccacaacgcgcattttgaccttgggtttttacaagcggccattgctcgctcaggcacaaaaaaccaaaacccgttccatagtttttcagtgatggatacggtcactttaagtgcagtaatgtttggacaaactgtacttgcaaaagcatgcattcaagctggaattgagtttgatggtaaagaagcacactctgctttatacgatactcaaaagactgctgaactgttttgctatattttgaacaaactgtctccttacctccttgacagtttggtggcggcttcttaagataccgccatcctcaacgtccctatcgtctagaggcctaggacatcgccctttcacggcggtaaccggggttcgaatccccgtagggacgccatattctcttcatataaaatttttctctctaagttctgtcttcttattctttttatatttttctttatttctaaataaaatacacttgtgcaaatatatcactgatccagtatttcctttacatcgttttacaatataataattcttatttttatactgatatttattatcaaaaaggttttaaatggatcttaagcttcgccttctctccctgagtattgcacaactatgctgtattccagctgcttttgcagacacgaacaactcttcaactactcttgcaactatcaaaattaaagcccaacaggcatctgaccagacttataaagtggatagttccagtagtgctacgcgtagtgaaattgcattacaagataccccgcaatctgtgagcatggtaacccaaaaagtaattgaagatattggtgcaactcgcttagttgaagcacttgatttagctggtggcgtgactcgtgctaataactttggtggtcaaggtttaactggttttaacatgcgcgggtttaccagtggtgagttttatcgaaacgggtttccaattaaccgtggctatccaaatgcgccggatagcaacacaattgaacgtgtagacgttttacgtggcccctcttctagcttatatggccgtggtgacccaggcggtacgtttaacttaatttctaaaacaccaaagtctgagcaacaaaccactttaggggcacagctcagtagtgaaggtttatatcgcactaccgtagacacgacaggtactgtacccgatgcagaaaatatcggttatcgcctaaatgtaattgcagaaggtggggatagttaccgtgaccatgtcgaatctaaacgttatggaattgcaccagtcattcaatggcaagctactgatgccaccaaggttacttttgaagccgatattttaagaaaccaacatccactcgaccgtggtcatacacgttatccaacacagaaatcttttaatagctcaccagaaacctatttatgggaaacgggtaaatactacaatcgactctacaatgataacaatatgactcaattacgagttgaacatgaccttgggaatgactggaagctaaatgctggcgtgcaatatttaaatggcaaattgcatggctatgcagtagaagcaaatggcattcaaaatgacggagaaacattagggcgaaattacaattatcgcgaattaaaatggcaagataccgatgcccaaattaatctcacaggtaattttcagcttttaggtttagcccatactttagtgactgggcttgaatatgaaaattatgattataagtcatacattattcgctcaagcggagatatcggtagctaccctattaatatttataatccagttttagggcaacctttacctgagctcaatcgtgtaaccacacatgaccgtgaaaacttaaaaacaacggccctttttgtacaagaccaaatcggcttaaatgagcgtttaagcgcactcttaggcttacgatttgaacattacgagcacgattacaaaaacctattaccaaatactaccaactggaataccagtcatgatgcatttattccacgtttaggcttagtttataaagcaagtgatgacctttcactctatggcaatgctgcaaaatcttttaaaccaaatactggcgccagccgtaacggagaaggttttgatcctgaagaaggtacggcttacgagttaggttttaaatggcaagcacttgataatatgttatcgattgattccgctattttttatgctaataaagaaaatgtattaacattagaccctgttgattcagcttataaagtcgctgctggcgaagttcgtagccgtggcattgagttaaatattgctggtcaaattacaccagcttggaaaattattggtggatatgcttatacagatgcggaagtaactaaagacaatactctgcaaaaaggaacagctctagccaatattccaaaaaatagttttaatcttttaaatatctatgaatttcaagatggccctttacaaggcttaggtctaggcatcaatcaaaaatatattgataaacgtgcaggtcagacagctaatagtacctataccatgaaaggttatgcagttacagatttggtttcttattatcaggcgacaccaaaacttcgtcttaacttagatgtgaagaacatttttgataaagtttatgatgaaagtgctttcaatttatatgcttatccgggtgaatcacgtaccgttcaattaggtatgagctatacgttctaaattgagcataaaggtactatttcatccttagaaatagtacctttactttaagaaatttttacgctgacttacgtgaattcacgcgtccttgaacaacagccttaatattacccttggcataatttaaaaacacgattaaaggtgacagtttaggatttggctttttaccctgcccaatggctttaaattgtgccgcgtaccaaataatttccataattgccattttatcgacaaaaggtaaacctgttttaattggttttacggcgtagcgaacgtcttggcctgcgattaaacggtcagttaaatctgtttcaacagcaagtggacgagcaataccaataaagtcgcatgccccacttgctagagcagcattcatgccttctactgtacggaagccacctgtcaccataagtttacattttacatgctgacggattttttcagcgaagtctaagaaatacgcttcacgtgcaatagtacttgccttacgtttatcagctttggcaccagccattgcaggtgcttcgtaagttccacctgagatttcaattaagtcgatccctgcttcatcaactgctttaaataccgaaatcacatcttcttcgctaataccgccgcgttggaagtcagcagagttgagcttaactgaaataataaaattatcagaagttgcttcacgtactgctttataaacttctagtaaaaagcgagtacggttttcgattgaaccaccccactggtctgtacgtttattggttaatggtgataaaaactggctaattaaatagccatgtgcaccatgtaactgtaccccttcaaaacccgccttttcacaaatacgagcagcagtcgcaaaacgtttaataatatccaaaatttcttcatgcgtaagagcacgtggagtaccaaacatagtcgctaaagctgggctaaaaggaactgccgaaggtgcaactgtttctttatttaggccctttggacactgacgcccagggtgagacaattgaataagttgtaccatcccatattgtttaccgactgctgcccattcttttaaacgctctaggtcacgctcggtttcaatcaccactaccccaggttcgtttttggcctctacattgaccataacatttccagtaatcgcacagcccaaaccacctttggcccatgcactatacaaacctaaatgtaattcattcggctggccttcatagtttgcaagtgcctcactcattgcacctttaataatccggtttttaaatgtggtatttcgaattgtgattggttgtgcaatctggctcatggttaacctcttttaatattttagagcaattactctaatttagatgagttataggtcatgtcaaggggaaatcgataactgacaatagcacatgtcaaatttaaaaaatataaaaaaatgcaactttttgcattaaaaatttaaataaaatttattattataaaatagaatcttattaaatatatttaacaacttgctgcaattaattgcttggtatattcagtttttggggtattaaataactgctcagttggctgatattccacaacttttgcatgtcgtaataccatcactttatgacacagtgctttgaccacatttaaatcatgactaatgaaaatatagctcaagtgctctgtttgttgtaaacgtcgtaataattgaatcatcgctttttgcgtggttcggtctaaggcagacgttggttcatctaaaattaaaagtttaggtcgaactactaaagctcgcgctagagcaacgcgttgacgttgtccacccgaaagctcgtgcggatagcgatgttgaaagccttcagccaactcaacttttatcaaagctgattcaacttgctgtttaatttctttatcagctatcgctttgacttttaacccttcagcaataatctgccctaccgtcatacgtgggtttagactaccaaatggatcttggaaaacaatctgtaagtctgacctgatcttgcgtaaagctttttgttctaagcggtttatatcttgccctagaaagttaatctgtccctcacttttaattaatcgaaccagagccaaagccaatgaagattttccggatccactttcacccacaacgcctaatgcttcgccttgattaagctcaaaatttacattttcaaccgcattggtataaccctgaattcggttaaagaaaccacgtcgtattggatatttaacattgagttgttgaacagataaaattttatgactggttgaatgttgctcagcgaaaccaagatcatgatctaataattgctgggtatagactgaagttgggtgttcaaaaatctgttgaagcttaccttgctctacaacttgtcctttatgtaatacaatcagttcatcagcataacggcgtaccaaatttaaatcatggctaatcaaaatcagtgccataccatatttgctttgcaaggattttaataattctaaaatttgcgtctgtaaaatcacatcaagcgcggtagttggttcatctgcaattaaaattttaggttgaagtgcaagcgcagccgcaatcatcacccgctgtttttgtccacctgaaagctcatgcggataacgttttaaaatgtactctggattagcaattcctacatcttttaataattgaattacctgctgttgagctttcgcttttgacccaccttgtaaaataaaattttcacctacaattttttcaactcgatgtaatgggtttaaagttgtagaaggctcctgaaaaatcatggcaatttggcggccgcgtatgtgtgtttgcgtcttttcgtctatttctaaaatattttttgaatcaataataatacgaccagatgtttttaatttttctggtaataatcccatcatcgccaaacagcttattgttttacctgaaccactctcacctacaattgcaagcgtatctctggcttgtaagtgtaaattgagaccttctaataaaggctgatcttgcgtagagattgaaaggttttctatatttagcaatttagcatctacatttaagttattttcttgggtcaaatgcatcacgtgccgcctccccaatataaattaataatgacaatacaaaagctaagctaaaaaacccagataaagccaaccacggtgcgtctaagttatttttaccttgcaacaacaactctcctaaagaggctgcatctggtggtaagccatagcccaaaaaatcaagtgcggttaaagcaataatattagtggtcaaaataaaaggtaactgcgataggctagaacttatggcatttggcaaaatgtgcttaaagataattgctctatcagttacacctaaagcctgagccgcacgtacatagtcaagttgacgcgcttttaaaaattcggcacggacaattcccacaagtacagtccagctaaagaacagcataataaaaaatagccaatatacatttggggtaaacatgctgaccaaaatcatgaccataaagagcataggtaaaccattccagacttctaccaaccgttgccctaacaaatcgacccagccaccatagtagccttgtatagcacccacaaaaataccaagtagcgctgcacaacctgttaaagccaagccgaaaagtaatgagactctaagcccatagagaatacgtgcaagcacgtctcgcccttggtcatctgtccctaaccagttctgcttagaaggtggcgatggcacaggtacagccaagtctaaattaggagtctggtaagaaaatcttataaggggccaaatagcccagcctttatgattaatgagttcttgtacagcgggatctttataatctgcttctgtttcaaacacgccaccaaaagtggtttcgggatatgttttaaagacaggcaaataataagcgtcctcatatttcactaacaatggtttgtcgttagcaatgagctcagcagccaaggacatcatcaaaatgagactaaacaaaacaaagcttgcccaccctaatttatgttgcctaaacttttgcagtcgtgatcgcacaataaaagacattatttgcctccttgtgcgtcaaagtgaatacgcggatcaatccattgatacagtacatcgcaaataagacgtaaaagcagactaaacaacgtgaagaaaaacaatacgccaaaaataaccggatagtctcgctgaacaattgcttcaaagcccaacaaccccacaccatctaggtgaaaaataatttcaataaaaagatttcccacaaagaaaatgcctgctaaagcttccggcaatccagcaagaaccactaaaatggcattacggaatacatgtttatataagacttgttgactatttaaaccttttgcataagctgccaagacataaggtttattaagctcttctaaaaatgaatatttggttagataagttaggctggcaaaaccacccaacaccatggtaataagcggcaacgtcatgtgccataaatagtccgtaatttttccgaaccaactcaattgataaaaattatctgacactaggttttgtaatggaaaccactgaaaatatgaaccgccagcaaaaaagacaataagtagtataccaaagacaaagctgggtactgcatagcccaccactagcaataaagaagtggaacgatcaaaccatgtaccttgttgtttggcttttttaattccaagtggaattgaaataagataaatcagtaaagtgctccatagcccaagtgaaattgacacaggcattttttcccagagcagctcaaccactgatttatctttaaaaaagctttgtccaaagtctaaagtcaaatagccttttaacatcagtaaaaaacgttctactggaggatggtcaaacctgtattgggctttaatttgctcgaccatttcggggcttaaacctttagcaccttgatagtacatttcagtgcctaatatacgccctgctcctaagccactttctacttcatgaattgcctgttcaactggtccacccggtgcaatttgcacgaccacaaagttgatcaataaaataatgaacaacgttggaatcattaaaagaagtcgctttagaatatatgaacccatataacaggatttcctttaggtacgtgcttttattgttgatgtaaatattgagcaactttcttagcttggtttgcattactccaccaatactctataccggcagagagcacaggtttcactttaggctgctgatacatattccagtacgcataccaataatccccttttccataagtcgggatctggtaatatcctgcacgaagcaatcggtcaagaacatgagtataagtgatttgctgttcacggtctttggcagtgaccagttttgaaatcacctcatcaattaccggattacgaataccagcgtagttatagttgccattttgaactgctgctgcacttccccagaactgagcctgttcattgcccgggtttaaagattgcggcaaattcatcgtagtcatgtcaaagtcataacggcgtgtacgttctaaatattgcggcgcatcaacctgccgtaaattaatattaattcctaatttttttaaatttcttacaaatggcatcagtgttctttgtttgccatcttgctgaatgagaaactcaatttgtacaggtttgccttcgggcgtatataattgcccttctttaattttataacccgcctcaatcagcaactgtctagcaagtaataggttttgccggttaaaaccactggcatctgaagctggatatttccaatcagccaaaacagctttttgcatgattggagaaagctttggcaaaagaggctttaatatggccatttcattgtttgaaggacgacctgtcgctgccaaatcactattttcaaaataactttgtagtctttgatattgtccgtaaaacaaagctttattttgccattcaaaatcataggcataagttaaagcttgtctaaagcggatgtcattgaaaggtttgcgccgtgtgttaaaaacataactctcggttgcaatggggttatgatgtctaaatttatattgcgttatcaagcctgcttttacagccggaaaatgatagtcagtaacccattttttaggattagtttcttcatgcaaggtatattgcccagatttaaaaccttcgaatgcaatatcccaatttcggtaataaacatactttaaatgatcgaagttatagcgccctttattaataggtaagtcttttgcccaataatttggattacgtttataactaatactccgacctgcatcaattttctcaaccacgtaaggccctgaacctataatcgattgcaagctaatacgggtaaaatcgcgtttctgccaatctacttttgagtaaatcggtaaactcgccacaacaaatggcattttaggattatggctggacttaaaagtgaatttaacttgatgtgggtttatcacttctgttttcgctaagtctgcaagatacatttgtagaccaaaattagatttggtttgataggtatcaaagctaaatttcacatcttcagctgttacgggcagtccattactaaatcgagcttttgggtttaaataaaaagtaactgactgggtttttataggatcatacgaaactttttctgccaagagtggatataacacgcccacttcatcaagtgactgggtcattaaagtatcaaaaagataatttaccccttctgtcgcatttcccttaccgttcatactgtttaagttatcaaatgtcccttgcgcagcctgactcaatactccgcctttaggtgcattcgggttggcataaggcatagaagccattgccagatatttaggcttagaatgaattgcgatatacggcgtggtttgctgagcagagaatataacttgcgaaaaaacactgagcccgactagcaggctcagttgagaatataacttttgcataaagtactaattattctataaattaggcactttaatgatatcgccaatacgcaattgagtcgacggtgttaggttgttgagttccgccagtaaagtggtttctaaaccatatttactcgcaagaccaattaaggtatcaccacgtttgactttgtattccactacagtttttggaatcacaatattttgtccacgctgtaaattggcatttgcttttaatgcattcatttcagcaagttcacgaactgaaatacccgcacgactcgcaatagcatttagcgactcaccagctttaaccgtatacttttcagtatttttccctgcaactacagcttttggagacgatttcgccgtatccgttttagctgtttctactgttggtaaatcacctgttaattttaagcgttgaccaacacgaacattactgttgcgagacaaaccgttcaatgcagcaagataatctaactgtaaatgatagcggttggcgatatttcctaggctatcaccagatttaactgtgtaggtctctggcgtttcttctttggtatttttagccgaaactttgctagttgtttcaacttcaccagttaattttaaacgctgaccagcacgaaggcctgcagtacgtgacaagccattcaaatcagccaaataactagtttgtaagttatatttagctgcaattgcatttaagctatcgcctgactgcacaacatattggtcaggaactgatgcaccagccggaacttttagagtttgtcccagttggacatgactgttggcttttaagttgttcagttcagcaagctcagctaggctaattttagacttggtcgcaatgcttgataatgtgtcgccacgctgtactttataactttcagttttatatgatggacctgctgcaagcttttcatatttaccagaagccttgctgtcatcaacttcatcaacagtgatttcttttgcaggtacattaattttttggcctacaattaaattactaccagctgataaccctggtgttaggtctgccaactcttgattagataatgcataacggtctgcaattaatttcaagtattcgccacgtttaaccgtataactctttgttgcaatacgacgtgtacttgcttgaattgcctttggctctactttagcagcacgattacctttaggttcttttaactgtaatttttgccctacaaacaagccatctgttacagacaaatcgttatattcagctagctgtttcactgacaaattaaattgatttgccactcctgttaaactgtcatttgcttgaacaacatagacatcaggtttagctgccgattttgccgtagtttccacctcttgaggcttagcatcatagagatatagactggttcctacaaataaagtcttttcagggtcaatctggttccatttagctacatcacgccagttcacaccattcttcatggcaataactgctaaagtatcgcccggttgtactgtataagtactacgcttacctttaggttgtacaaccacaacatctgtatcagtcttgatataaggcttatctttattgcgctgagcatcttcagagtttgcaagagttgcatcttcagctaaagtttttggataagcaaaacctttacttacttctttaccttgctgctcagcaacagattggctggtctgaattgcggttaacttaattttgccgtcatacggatcgacaatttctgtaccctgaggtgcaagtgcttttaactcggcaacaacttgatctttttcagcttgagtagcttgaggctctaaagcttgatcaactgtttccttttccccttcagcacgcactgccgctaaaattttctcgcgttcagttgctgaaattggcggttccgttctcacaggtttgatatttgcagccggagtgaccgcaacaggaatacgtggtgcacttggtacatcagctgacgctgcaaaagcagctagcgcatcagaaccacgaggtgttgcagtttttaccgttaccgagctgctacttgttttagcaggtgtcgatggtcttactggctgagctggagttgatggagtagttctaactgtgactgaagttgaagtcgttgtggtcggtttagacggcgaagtaacacttgcccaccagcctgaacttccacctgctttcattccttttaatttgttatccactgaaggacttatatcagctggaatcaaaatacgcattggacttgcagggtctactgtttcaccacgatagcctgggtttaatgcatataactcagcacgactaagacccgtcaccgacgcgatttcatttaaagataatggtgcagataaggtaacttcacggaaatggggtctgtttgcaatcggaggtaacgaaaccccataagcgcgtgggtttttaataatttgtgcaacagccaagaaacgcggaacatagttcatggtttcttgcggtaattttagtgaccaatagtctgttggcaaaccagcagcctgatttcggttaatcgcctgttgaatacgacccggaccagcgttataagcagccaaagctaattcccatgaaccgaactggttatataagcttcctaaaaactcataggcagcacgtgtagattccacaacatcacggcgtccgtcgtacatacccgtttgttgtaaaccataaatacgaccagtactaggaataaattgccataaacccgccgccgccgcactacttgttgcagctgggtcatatgaactttcaatcactggtaataatgcaagttcggttggaagaccacggcgttctgcttctttaacagtatgatataaataacgacttgcgcgagcacttaagcggtcaaggtagggctgacgtgagataaaccaactacgctgcgcttcaatacgtggatcccaatgattgaggtccattttgaagcctacggccatacgcttccagacatcaccgtgttttaaaataagtaaacggtcaccctctacagcacgcatatctgttgctgaaagtaagtcttctaaagagtccagactgcttgcatcaagatagcctgctccactcacctgttttgttttcgaggtttttgcagattgcggagtcgaagaacagcctgttgtaatacccaacgcagctaaagcagagctaaggactgtaattttgaataatgatgctgcagatggctgccacacaaatgtggttggtttatacataaaaacttccaaacaactcgcgtaatatttcttggggtctgcccacaaaccctaggtcttcgatgccattgtagtaaagcatgcaagatagacaaggcaataatttaatgtcatttgcatggaaatgttacaagaaattaaaaaaagcttgctttgtaacgatggaaccgaactttttgcgtatacaatacaccaaattcagctctttttctttcagtttaggtttcgatttatgtctcaaacaatcacactgtatgttgatggtgcatgtcgtggcaatccgggtttaggcggttggggtgcatatgtcattaccgaacagggtgaacataaattatttggcggtgaacccgacacaacaaataaccgtatggaacttactgcggctattgaaggaatctctttttgccctcctgatgctcaattaattgtctggacagactcaaattatgtgaagcaaggtattacagaatggattcatggttggaaaaagaaaaactggaaagatgttaaaaatcctgacctatggcaaaaactcgatgccgtttgtgcgggtagaaatattgaatggaactggattaaaggccatgcaggacatgcaggtaatgaaatggctgaccaacttgcgaatttaggtgcagacaaaactgctcaagaacttaagcaaccacagtcagccactgtatcgcaagatataaaaaagcctgaacaagactggttactagacgatcctttcggattcgatctggttgaaacaaccgaagatgaaacggtcactttagagcagacacaagaagttgagatgattgttgtggatgaagaaatgaatgtagttgaggctgtagaacaagaagaacaacagcaaaataccaatattcatccacaaattgtgatgactgaagccaagcttaaattacaaggcccaagacaactcatactcgatacggaaacaactggtttctatttccaagatggtgaccgcattattgaagtcggtgccatcgaaatgattaaccgtaagcttacgggtagttcgattcacatttatattaatcctgaaaaaccagtgggtgactctgttcaagtccacggtattactgatgagtttttggtcgacaaaccaaaatatgcagaaattgcagataccttatttgaatacctaaaaggcgcagaaattattgcccataacgcaaccttcgatatgaacttcttagatatggagtttaagcgtgttgggttacctgctctttcagaagtttgtgaagttaccgatactttagctttagcgaaaaataagcatcctgggcagaaaaactcacttgatgccttagttagacgttatgaaattccagcgcgtgaccgtactttccacggcgcattactcgatgctgaaattctttctgatgtttacttggcaatgacaggtggtcaagtttcctttgatatggatgccctatcgcaaagtgaaagtgaccagcaaaaaacgaccaaagctagagttcaaattgaattacctgttatttacccttcagatgaagagctaaacatacatgagacttgggtcaaagaatttgagaaaaaacatggagaaccttgcctttttgcaaaataaatttttgattctctaatgtttttttagtttccccttttgcaagttaagttatattagtcgtatagatttttagctcaaactattgagccatgacgaatataacaattgattttttttgcaaaggggaattttttatgtctgagcataattcgattcaatttgatccaacagcgttactcatcattaaaaatgaaattgataattcaataaaactggtggaaggcgctgtaagtaccttaattgaagaacaggctctcccttttggtattgatgatgcattagaacaatttaaacaatgtactcaagtcttacgtctcattgatattccgtatttggcaaaaatcactcaatattcaaccgagttgatgcaaaagattatggcgaatccagagcgcatcaataccgatgacgttgttgctttaagtgaaggcacaaccatggttaaacgttatattgagttcatctgtttacgtgaagtcgaagtacctcagtttcttttagacaccttaaataatttagaaaaagctttaaataagccactaacctcttctggacaacagattgcatcaaagctttcaacagcttcacttgagttaccgttacccgaagtgcttattaatgaaagaactcagtttatccatcagctttataaattatcactacatcaatttttaaataaaactgaaaatgctcgagactttcaagcatttaaactgattggcggttatttagtgagtatggctcaaggtcaaccaagccagcaatactggcaattggtgaactctgcctttagtcatattgatgaacttgttttaaatgatgctcgcctacgtgtgttcattaaccttgaaaatgccataagtttatttttagcttcacctgaaggctttgaagcaaacttaactgctctagcagatatcctgagtattgtgattggacaagaagaccaacttgcgcagcaaatccgtagtcagttaaacattggtcatgagtttctcaccgacactcaacttaaagcactgagccaacacttgtatggtccagactttgataccatgcaaacggtaagtcaattaatcttaagcgaaatgaataaagttcgtaatgatattgaatataactaccaaaacatgtcaccagaaaaagctcagcaactacaaagcaatcttatgcagcttgctcatacttttaaattactcaacttaaatgaagctgcttcagagctttctcaacaagccagcagtttaagccaaatcaatatattgagtaatgaaaactatgctcagcagttgatgaaaagcattttatctgccatgaatgccattggtattttggtgcgccattattcatctaaccgtctacaaattcgtgtgaacaataccaatatctctctagatcgtttagatgaagcacatcagacattattgaatgagaccaaaaatttaatcgattttgtatgccaaagtttgactctctatgccaacgatcaaactcaaaatattgaagcaattgcaggctctttaaaagagttggctggcgcggctgaatttttaggaagtacagttcaacaaaatgctttacttgaaactgccaagtttgtacaacagcaaatcgatcaaaatcagcctttcaatcatgatcagattcactgtatttttaacgttttagctgggctagatatgttagttgacaatttaaaaaataaacagcctgttctacaatccatgtttgatgtagcattgctaagtagtcaacaacttcaaaaaaaggcagcttaatgtctgagttatcacttgcttatatttttcatcatcaacaattattggttgaccaaaaccttcaattacccaaagtcgaaaagttagcaagtgatctgcttttcactcatgatgaacaggtcattgcacgtgacctgttgagtgaagaagccattccggaaggcctgcaactcgttccaattcgtcaacttatttccaactggtcaaaagaacaatttttacaggcaagtcgtgctgtacagttgctcgaatggcgacgtaatcacaagttttgtagtcactgtgggcatgctaccgaagtacaccctacagaatatgctatggtgtgcccttcttgtcgctaccaccaatatccgcgtgtaaacccatgtattatcaccatcattactaaaggcgatgatgaaattttattggcgaaatctattcacaataaaaccaatatgtatggcttgatcgcaggatttgtagaagttggggaaacgcttgaagaagctgttcagcgcgaagctttagaagaagtgggacttaaactcaaaaatatccaatatatgtcaagccaaccttggccttttccaagcaatctcatgattgcatttagagctgaatatgagtcaggtgaaatttctttgcaagaagatgaaattgccgatgcacaattctttaaatttgatcagttacctgaaattccatttaaaggcagtattgcacacgcaatgattacgcagattactcaagcgaagtaatctgcgctctcgaactgatgttttaaaatacttcatccagaaagtgcaaaatggtccgtttagttcggaagtaatgacttacaaaactcgataaactagccaaaattgtaatatgacctgttttaggaatcacagcgatatgactgtgatttccgctttgcctaagtgcctgatcaagatcaaaggtattttctttttttacaagctgatcattttcagccatgagcagataatgcttaatatgattttgatttacaaaataatatggcatcacttctttataagaaataccttgatcaaaagcatcttcggcaagcggatcacctttataatcaaaatgataaggacctgccaaaccaaaaattgctttaatattacctaaacactgaattgtatttggttttgggtgataaacagcagacatcacattaaatgcacctgccgaatgtcccataagcacaatattctctgtcgagatttccaatttttcttggttctggtgtaaatagtttaacgcttgtgttaagtcatctacataacttggaaaaatattcttcggtgcgagctgatagttaatgacagcaacgtcataaccttctttcgtaaacgcttcacctataaataaatagtctcgtttattaccatgttgccaagcaccaccatgtacaaaaacaatgagtggtcgatgagctaagcgcttagtagaacgataaatatctagacgatggcgaggctttaagccataacgcacatttaaaacctgctcaaaaccatcttttggtgtaaaacggtttaaagcaaagctccctaaatcatacagacggaactctttataaagagttctcgcctgctcaattttgctttgtaattgttcaatcaggttcatattttattgtgcagaagatgctggatctgtttggtccggatcaattgcaacaggagtttgaactgttggttgagcaagaacgttattaattactggtgtagttgttgcactggcagtactcgctgccggagcaggcgctaaatcaatattatcaatgagcgttacaatcttagtcacgttaccgacattttgaagcacattgtttaagtcattaatttcagctgtgtttaaacgacccatcacatataaaacaccatcttcggtatgaaccagtactttactgtccgatactactggcgctttcattaataaagcacgtgtatttgcagttaccccagcatcttgcataatcgtgttatagcttactttgttacccaccgtaatatagttatgtacggctttcacatcactcatggccttaacgttgtcttctgccaactgttttaagtatgggtctggcacctgtccagttaacaatactgtgctatggaagctttcgatgttaatacgagattgtttaaaacgctgatcaagcttatagaggttaatattcgctgtacgcttaattgaagaatcaataaatacttggcctaagctacgtacaccactatctgttccaactggagctgtacctgttccaccagaaataaaacttgcgcaacctgacaaacttgcgacacaaagcgctgttacagcaatacgtttcaacactccaccagactcctatcaatctcttcttggcttgatcataaaacatcggtctttaatttgctcaaaagagtaatgaactcttaatccaaagtaaatgcattttcgatccattgcagatcataatggaatttcgaaaagtcttgctgtactgtttttgcaattttctgtggaaaatcaaaacaaatcacatcaaaacgacaataaaaatcctgataagatgggtagcgctgtaaaaacctcatcgccgtcttaattatttttttctgtttgctcaaggtcaccatttcacaagcttgaccataatttccctgccctcgcgcttttacctcaacaaaaatcaattcgttaccgcgttttacaatcagatcgacctctccacggcgtgaatgataattactggcgacccattcataattttgttcttttaaaagttttagtgctgtttgttccgcccattggcccaactgctgtgcaactaacataatttttttgtttccccaattaaaaatgtaaatactgttaatgtcggttctatacctttttatttttgaattgaataaatcaaaagcagatgtttcgaaaaataaaaagcctactgacattgttcacgccaaaaacataatttcgggtacactaacccattaaaattgtttatctgtacggagtaaaaaccaaatgagtgctcagttatttgttgtagccacccctatcgggcacttagatgatatgactttccgtgcaattgatatcttaaaatcagtttctgttgttgctgccgaagatacacgccaatcagctcaattattcaaacactataatatatctaccccacttaccgcatgccacgaccataatgaaagcaacaaaattgagcagttagttcaaaagctacttgctggtgaaaatattgctttgattagtgatgcaggcacaccacttattagtgaccctgggtttaaactggtccgtgctgctcaagaacatggtattagggttgtacctgtaccgggtgcatgtgctgcaattgcggcgttaagtgctgtgggcttaccaagtgaccgctttagttttgaaggttttttaccatcaaaagcttctcaacgtattacgcaacttgaaaagcttaaaaatgaaactcaaaccttaattttctatgaagcaccacaccgtattttagaatgcgtaaaaaatatggctgaagtatttggtgaaaaccgccctgtgggtttcgcacgtgaaattaccaaaacttttgaaaccatcaaaaaaatgactttaaaagatttggttagttttattgaaaatgaccataaccaagaaaaaggtgaaattgtccttgtggttggtggtgcagcagaaaaaaccgatctggaacaagaaaaactagatgaacttttaaagcgcttacttcaagatctatcagttaaagcagcatctcaactggctgctgatttaacgggtattaagaaaaaagtcgcttatcaacgtgcgcttgagttaacacaatcttaatttattaactaaacggtgatgaccaatgcctatgtcatcaccgcgcataaattttgcataaaaatattaaagataaaaaataagagtattgatatgactgaatcacttggaaaacttggcccgcatgaaggacaagaactagaattattactttcaggcaaaaaacctatcgcttatttttatgagttattacccattgaatttataaagcatcttgaacaagggtctttatctatgctcagtaaagacattgaaacctctctacctttccccttttcaattatgctgatctataaagatgcgtctttagcagatttgaatgaactcatgttatgtattgaaaggtcattaaaagcaactcaacttgaagagcgcctagaactcgaccgtagaatcggacaacttttaggttactcaacacaagatatagagttttatattcaacacatttcaaatcgacatttaaaaactaagatctaaaattatctcaatatctgttttgctgattcaacaatggtctcagtcagtacatcaagttgtttcgactgtcttttccagtgatgccaatataaaggaacatcaagttgagcctcaggcataatatcaacaagtattccattttcgagtaatggttgaacctgaagttcgggcaccatgccataacctaaacctagttgaattgctttcacaaaggcatctgtcgccggaataaaactataaggataactctgcattggtaaaccgtatccttttaataaaacctctgaatgcattaaatctttatggttaaaaataaccgccggtgtttttcttaaaacttctcggttaactccaccactaaaccaccgatttacaaactcggccgatgccagcattttatagcgcattttaccaagaggctgagctaagcaacccgccatcacctgctcttctgctgtaatacatgcattgacctgacccgtttctagcaaagtatgcgtatgtgattgatcatcaatttttagctctaatactattttttctttaaaaagtgtttgctgaatactgggtaaaagccaagttgccaatgagtctgcatttgaagccaacgcaattttataaaattctgattcagaagatttgcccattaaaccttgtaaaagattttgctccattaaccttgtatgacgtaaatgctggagtaaagtttgccctgcttgtgtaagcacacatggacggccacgtattattaaaatctgccctaaatatttttctagggcttgtacacgtagtgatacagcagagggagttatacataaatgctctcctgctgcatcaaaacttccgacttctgcaaccgccagaaaagcttcacactgcttactatccaacatacaaaacctaaattatttttagccaaacctaaatattcttaattttacttatttcttaataaaaagtcagataattctcccatctgatttttttctgcttaatggttatgctttctctgagtgtgttttttaaaggtttaggtattggtagcggcctaattgtagcgattggcgcccaaaatgcttttgttctaaaacaaggacttaaacagcaatatgtattttggctatgtttaatttgtgccctatccgattcaattttaatcgcctgtggtgtattaggttttgccgaaattatgacagcatcacccatcttaatcacagtcgctaaatatttaggggcaacgttcttattcgtctacggtgcaaaagccttctatgccgcgtttaaaactaaccaaggcatggagcttgatagcagccaaaagcagactttaacccaagcacttataacctgtcttgcctttacttggctgaatccacatgtttatttagataccattgtactgattggttcggttgcgacacagctagaagataaaatcagttttgccttaggtagcattcttgcctcttggatcttctttttcagtctaggctatggtgcaagatttctaaaaccattatttatcaatccaaaagcttggaaaattttagatttcatgattggttgcgttatgtggagtatcgcaatatcacttctcatctaatgcattcaaaaacaaaaaaagtaccatgcttacatggtacttttttatgcaatcaaaattaagcttctgaacccaacattaactttgattgttttctttcttgtaatgattgcttaatcacagcataacccgaagatacacctaaatatgcgataacaaaggctacgaataaatccggaaatatagtgcctgttccaaacacgcctacagctgccaaaacaacagcaatattggcgatagaatcatttcgactacacaaccagacagagcgcatattggcatcaccatcgcggaatgcataaagcattaaagcaacagaaacgttagcaattaaagcgattaccccaattgctcccatgaccatcggttcaggtgaaacaccatgaaaaaatgaccaaacgacttttgcaataacgaagaacccaaaagcagccatcgttatacccttaacaagtgctgcggttgcacgccagtaaaggctcatcgaaagcacgactaaagacagagcataatttgcagcatctccggcaaaatctaatgcatctgcccataatgaaacagattgggctttataaccgccgactatttcaacgacaaacatgagtgcattaattacaagtgcaatccataacgcttttctaaagcgcgggcttgctttctttgtaggagagcaggttgaagcacatccacatccagccattttatttcctcaaaaactcttttatagtgattaaaaacccttgagtagctccagagtcaagtcttatgagtctttctattggtcaattatcaaaaaaagcagatgtcccgatcgatactattcgttattacgaaaaagtaggtgtgttggaccgcattcagcgctcagaaaataattatcgtgtttacacagatcaaacacttgcagacctattatttattaaacattgccgtgaattagatatttctctcagtgatattaaaacgctaaaagaaatgaaagctcagccgaaacgggcttgtacggaagtcgataacttggtgaataaatacttgatagaagtatcggaaaagattgagcgactgttgcttttaaaagaaaccctaatcgatttaaaacaacactgctctaccgaccgtacagtagatgaatgcggcattttaaaagaactacaaaaccatccttaaatcatcataaaacgggcaataaaaaagcatcactcaagtgatgcttttttaatattaacgatcgctatgttcatctggtggaacttctgtgattcttccgccacgagctaaaaacgcagcgacttcatcttccaacgcttggcgttgtttttgtttcgcagttacggtaagcgtttctgcttctgcaagatcggcatcagttaagttgcctgcttcttcatcagctgcgccactttcagccgctttggcttcatcttcatctacagcagaatcttctgcatcttcataatcattgatatctgtcatttttacactccccacaatgatttgtattgcatcatcgctatggtcttcgagacctcagaaatttagcaatctctttgcatttagcaaagagccaaattggtcaaatccgtatcttttctgaccgaattggtaatgatatataaatgattgtttaaaaaatatctactgatatttatttagatcagtagagcataaacttcgtaattattttaacgactatactgggtgttttgtaaagcccctaaaccatttgcttgttgcataaaactctcttttaagaacgaaatttgttcaacttgcttgagtcccacgttccgagcccaaatcaatggaaatagctcactgctttctagccaaccaattgccgacatactatgcatcatcgcatcattttgtcctttacggcggtgttcataacgcattaaggtttgttcatgtgcccatacgccacggcctaaatcatgcaatagtgcatcacagagtatcgctgcatctaaacaaccaatattcaccccttgtccagcaagtggatgaatcacatgagctgcatcaccgattagggctagaccagctttaacgtattgttttgcagcgcgcgctttcaatggaaattgtgctcttgaacgaacatctaacacttcacccaacatatgttggctttctcgagttaaaagctgcataaactcgctatcacttaaagccgaatattcatcggtataatcatctggcagtgtccagacaatggactgccaataaccgttttcactttcttcaagactcgccatcggcaaatatgccaaaggtccagtaggcaaaaagatttgccgagcaacataatgatgaggcttagacgtttttatcgcacagctaatcgctgcttgtttgtaatctagtacatctagatcaataaaggcttgctcacgtacaaatgaattggcgccatcagcaccaataagcagtttagttttaagtgccgtgccatctgccaattgaatatgccagcacccgacaccttgttcaatacgggtaacacgaacttgagtacgatagtctgttaactgctcaagcattttttgttgaatagcaacattcaatacacttggctcaaccatagaacccaaggcttgctctggcattggtctttgtacagactcatggccaaaattaatttcaccatagccatttaaattccacacttgcatgccggtataaggcatttgacgtgccagatcatcccaaacattgactgctttaagtaaatgaatcgtcgcttggctaagtgctaaaacacgtggattcatcacgcttaatgttttttcaacatcaagtacaggggcagcatcaagcacggtaggctgtacaccaccttgtgcaagtaataaagcagttaagccaccaactagtccaccaccaacaatgacgacatctaacacttcactcatgcttttaaccccattgcatagtttgctaccagtggcttaacacccggaatgacatcaaatgcaattaatccagtattacggattaattttaataatgggttttggttactaaagccccgaactacggtatcgcagaatttaattactcgctgctggtcagataaacgggcttgttcataggcaagtaaattatctgggttaccaatatcatcagatgcgcttaactggttcactaaataacgcagcaatacatctgcatcacgcagacataaattaaaaccttgcccagcaacaggatggattgtatgcgctgcattacccattaaaataacgcgtccaaccgcttgtttatgcgcaagcacttgtgaaagcggataactaaagcgtttacccgttttttcaaatttacccgctctgtcaccataagttttttgcaaggcatctaaaaagtgttggtcgttttcttcgcccaaccactcaccttcagtgccttttttaacaggccataccactgagcgacggtattcacccggtaatggcaacaaagctaaaggccctaatgcactaaaacgttcaaaccctacatgctcatgcggttttgaagtctgaacagtcgtaacgatcgcaacctgatcatagtcgtggacatcgacaccaacgccgatagcctgacgacagaaagagtcacgtccatctgcggcaattaatagctttgactcaagttttaaaacttcatcaccacgcttggcttcaatatgtacttgttcagtatcttgagttaaagcagtaacctgtacgccatcaatcagctcaatcaaaggctgctgacgtacttgagtcaataaaacacgacccagccaagcattttcaatcacctgtccaaagctttcgactttttcttgttctgcaattaagcgcgccttaccaaaactgccttgttcagtaatgtgaacttgtaggattggagtcgcgtgttgctgtaatgcatcccataaccccagcttctgataaatctgtacactacgacgcgataaagccgtattacgcgcatcaaaactggaatgataaggggcaacattttgatcatcatagtttgggtatttcacagcttctaacagctttactgcaatattagccttcgccagcatgagcgaaaggctaagtccaaccattcccccacctacaataatcacttgttgttgcatcgagttgtgctcctttggcgaatacgtttaattatgatttagcttgcgccattaaatgttcaatatctgcaatatttttaaccacatcagcagttaaaactcgtggtcctttcgaggttgcgaccacatcatcttcaatacgaataccaataccacgccattttttatctacactttcatcgtctggtgcaatgtataggcctggttcaacggtaacgaccataccttcttcatattgacgccagtcttcaccttttttgtaagacccgacatcatgtacatccattcctaaccaatgacctgtaccatgcatataaaattgacggtatgcttcggtttcgataagttcgttaatatccccgttgagcagacctaaatccactaagccttcggttaaaattttaactgctacttcatgaggctcacggtacgaattaccaatgcgtactgcatcaattgccgcatattgagaagccaaaacaacttcatataatgctttttgctcagcactaaatttaccattgaccggaaaagtacgggtaatatctgatgcatagaactcatattcacatgcagcatcaattaagactaaatcaccgtctttaagaggttggttattttcaacatagtgcaaaatacaggcattagccccaccaccaacaatactgttgtaagaaggcacacagccgttttgcccaaatatataattgagctcggcttctagtgcatattccatcatgccagggcgaacagtttgcattgcacgagtatgtgcctgagcactaattgttgaagcaatttgcatcagctcaagttcttgtggtgacttgattaaccgcatttcatcgacaatacggtcgagctgtaccagttgagctggagcactttgatgccgatgctcagcatctgcttttttaatccactggctcactcgtgcatcaaacgcagcattgtgtccgattcgataataaagacgctctttatttaataatttttcaataatttcttcatcaagcagatcaattgcataagcctcgtctgcatcatagtcttcaatcgcgccatcaattccagcacggtaaccattccagatttccatctcgcggttacgttcacgacaaaaaagactataactatagtcagttacatcctcaaaggtttcaataactgcaactgcttcaggctcagcaaagcccgtcaaatagaaaaaactactatcggcacggaatttataatccgcatcacgattacggtacatctcctcacgcgttgcaataattgcaatactgttaggacccattttttctgccagacggtctctacgatgttgaaaatcagcttgaggcaatttcataatgatctacttgatttagaattttaaagtcaaaaaataaaatacaaccaataacacatcgcctcaattagcttgggcgatgtggtgtaaacatttcaacaatattctgatctgtacctagagcagcagttttactttttgcatgaaagtttttcaataaagaactttcagctacagtgattttttttctgccaatagacaagcttacaggaattaagcgtacaaattcatacaattcttcgtaactgctttcgccttcctcatcattgtcagaatcttcaaattcgactgctgcaacatcttgaaggtgttcaatcaattcgcgctcatcaccacgcacatgaccagatgctaaaccgaaacctaatacaacacccgcacaccaatcagataatgcttgcacacgttcttgaagtagatgttcatcgtctggaagcattggtagataatctaattcatcttccgataaagcatgaactacatcttctgcttcgtcagttaaaagcgctaaagcatcttcacttaactctggcacattaagggttgttaaaatttgtgaccattctgcacgcgtaggcgcttctgtcacacaaacaatacctgttaacagaccatgtaactcactagggcttgaaatttcttcaattccttcaaaatgagcgttccaatctgtccagcctgaaatatcgtcttgcattcgtttatccaatctctatactttgtatatattacctttgattgcaattctgtgcgacctcgttatgttagaacaattacagcgtctacaagcgcatattggcgttttaaaaacacgcttacatcatctagagagtgaaaattctgctctctcggaagctaaagaactggctgaaacagagcatcacgcacaagttgtgcaaaaaaatagcatcatcactaaaaaacaagaggaaattgagacgttaactgagcaactcactcagttacaaggccaatttcaacaattgaatcaagatgctaacacacttgcagagcgttacagccgcctagaaaaaagtacgaccgatttaaaaaatcgttttcaggaaattttggcagagcgtaatgaattacgcgtgaccaaagaaaaacttcagtcacagcaacgtcaaactcaacaagagttacacgacttgcagcaagatcgtgaccgtttgttacaaaaaaatgaacttgctaaagcaaaagttgaagccatcattcaacgtttagcaattttaggtactgctcaagatcaacatgcgcaagaaattcagcaacttgctcatccaaatgctgaagctggtgaggagacacaatcatgagtgaacaagtcatggtagagcttcggctgattgaacaaacttttaggcttgcaacgacttctgataaaagagaagagcttgaacgtgcagctgagcttctcaatgaaaaattcaacgatatgcgccgtagtgcacctcgtgttgagcataataaacttgtcattatggttgctctacagcttacccaagaagtgttaagccttaataaatctttgcaagaatatacgcattgtgaacgtctattacaggctattttggaagatgttgaacaaatagtgtaaacaattcgcataaagcttcatcaaacgcaaagtaagtttacagttcgataggctcagatgattgccaacgaagccagatcagttatactaaagctgtctctgggatgttcgccagccggtctgattcccctgagccgatatcatctctttaggatggtgttctgcatatttagagcgtatgcctaccccgagtaggaaacccagcaagtatgcgtcacctccaccttgaactttagggttcaagggtaacgacatgcagcggcatcttcggagcatctaatttaacttattaaacaacaacttataataatataaaaactatcaattcccttccaaacatcaatattctgaataatgtagccgctatgtagccactagaattgttgcttaatgttgtttattatcgcctaatcaagtcattaataatttgttgaatatgtccgttaataaacaaaccttaacaaaatcttttgttgattcactccccttcacggcggcaggtgaacaggttttttataaggatgacaaattaactgggtttgctttacgcgtaacgaaaagttctaaaagctatattgcggaaaaaaaattaccaactggtgagacatgtcgtgtgactatcggcaagcatggtatttggacagtccagcaagcacgcgaaaaagcccaagaatacttgttaatgatctcaaaaggtatcaatcccaacaaagataaacgagatagtaaaaatcagcttcttgcagaaaagcaggacctaaaactaataccaaccgttaaagaagcatatgaaagttataaggctaaaaaagacttaagcgccacaacacttgatgcatatgatcgatgtgtaaatgattactttgaagattggcaaaatttaaaaattaaccaaataacaagtaaagctgttatggatcgccatacagttttatcagaaagaagtagagctcaggcaaatttggcaatgaaatttttctctgctctatataatttcacgcttaaaaccacagttgatagtagtaataataagctgattacagaacccaaccctgtactaacaatttacgaaactaagacttggaataaaattaaacgtagaaaaaactatattagatctgaacagcttcatgactgggcggagggagttgccagacaatattggccgggaaatcaaaatgacaaccatctcgcttataccaatcaagattttttatttcttttagtattaactggctttagacgaaatgagggtgagggtctggagtggtcaaaaattgatttgaagtatggcactgttcttataacagataccaaaaatggtgaggaactgttattaccagttggggaaatgctgtggcatattttaagagagagaagaaagatgaatccggatgggaaatatgtgtttccggactttcggaacaagtcgcatattatagataaacgtcatgctcgtgaagctgtgactgaaagcactggtattgagttcacttttcatgatttacgccgtactttcagtacaatcgccaatagcttggctataggtagttatacaattaagcgcctaatcaaccacacaaccgaagatgatagtcaagatgtgacagacggctacgtacaagtaagttttgaggatttgcgaaaagcaatgaatatgattgaaaaagtcatcatttcagatgtggcaaaagagttgattctaaatagaatttatttccctaaaaacactcgagatttagagaaaaagtttaaaaatcataatgagttgattgttcaggcggctaaagctcaactttagatggtaattcccaacggcgtctattaaatgtcacggttccatcaatgttgattggtaattgattaccgttgtagtcgaaaacctttatgactttaccgcctttgtttacctcagcaagcaaattacatgtgtgctcaagctttccaacttctgtgaccataatcattaattgctgcatgataaaacctcgagagaatacagttgagaataattttgctcaaaatgtgcaattatccagattattgagcaaataattgcacactaaaaagtcattactcaagagccttcacaagcgcaccgtgtcttgctttgcagtcattatattttgcaactgtatcaactgaccagatcattaagtctttgccagttgttcctgccaattcatttagatttgggcatggttgaataagattagctggtattaccggctttaatgagttcattgagttgctgcatcccagcatcgtcaacacagctagacttataaacaggacgctccacgatcttttgcacttcacgtgtaactgtttcgactttagtgctttgctctgctttagctttttcatagtctgcgctcactttattgatctgattttgcttttctgcaagagctttcaaattcttgcgctcaatctcttggatctgagattgacacttttgttcagcttcttttagctgaccagttttgtaattgagtacggccaaagatatggccaataaaaaagcgagaaacacaataatgatttctcgccaatatttagcagcaaatacaatccacatcactgcgctcctatacattttgcgtgtcgttctacttgtctggtccagacgccataacacccgtttttacgaacagagcaatcgcgctttgcaacgtacttatatttaagtaaagagtcgcaagctgctttatattgaccagcctttaaatgcttaagcattgatgattttgcgaatgttggcacaccgtattgatacgtgaaatcaaggtataggtcatattcagtttgtgataatttcacgcccttcaatgaatctttaaacgcgacttcacgcttggccacatcatttcgcaaccacttatctgcggtcgcacgtgtaattggtggatctgtcatttttactggtgagccatcgggtttaaatgtagaaccatggccctgtgttggccgatcccctttaacgggaattactggctttgatgtaaacccttcatcgttttttacgcccacaaaaaaagcagccgaagctgctaagactgctgcaatatatttagtcttgcttgacattacagtcacctttattttccaagctttctaaataggctttaagtgcaatttcatcgcgcttatttttctttctggcgtagtaccagttcattaaaaaaccagctaaaccaatgatgatactgacccaaaatgctaaatcgattgacccgatccacgccgaaactgctcctgccacacttcccccgtatgttgcacccttactggccgccaaagcggtcgatgtatctataatttgctgattgtctgccatgcagccccctaatttcggcaataaaaaagccctaacttattaaaagctagggcttgtaaggtttttctatgtagttacgcttttttaattacaagcttatatcgactaccaataaaatcgggatcatcttcaattgatacttccgtattgaagcctttttcacgaagtagatctgaaatggccgttgttgtttcttcatttaaagtcatctttgaataaagagtacatactccgttttgtgcaatgtctgcctcaatctttggcagtgcaccctgtacatacatatctgcgtagttcatattaaattcctgattctagtgtgaatgatactgagaagcgcattggatcaactaacgcacctgtcaaatctgtaaaaaacaacttgactccagctgcaactttgaaagacgaccaactcccactgtatgcttcaattgcttgtagcgtcggtggcaatatagcctttccaccacctaatcccgttccagaaaaaatgccagaaacaaaaatgtgcggatttgctaattcagttgttacgcccgcatctcgttgcaatctatagactcccgtagactcttttgagatagaccagcctgcgttattttgttgggtagtaaagttgacatcataagtcagcatcatcggtgcaataaaacgcccgacttttgatacttcgtgattgtaagtattccactttcgaatttttttagtccacgagtctgacgcaatataaggtgtatttgtagcagtagcgccaattactcgcttaaatactacacttgcaactgatgtttcatcctgatttccaaaatacaattcgctattcggtgcattgatgtggattggtgttttatacccagaatctgccgcagtcggttgagtagtaattaataatcttcgattagtaccaccataccaattagcaaaaagtgttgctaaaccagatggagaaagttgtattttcgcacccgtcgcaccgcttaaagtaattcgacttttatcaattacaacccccccaatattatctgatacagccaaagcggttgtgtcagctcgatttagccaaggcgttctaatgtagagattattaactgtgcaattaaatgtttgttgataggtcgtgtttacaagccagtcacgagctacaccatctcttgtttgctctgcccaaattgcattgaatgagcaattcgaccagatacccgctgttaaaccgtactgcatatattcaagaataatattattaaagacgcactgataagcttctttagcaaacagcacagggtatttaccccattgccatgagcagttgtcaaaatatgcagtagtactttgtttagaatcaacatcagcaatataaaaccctgcatttgatgcactaattgacatcaaattttggacacggaacgaaaccgttgcattcgataaatatacttgattgtaaaagcctgaaatatttacatttgaaagtgtgaagttataaccatcaacttttaaacccgaaatattttctgaaacaccctcacttactaattgcaaatctcttacttcggcgcccacgttaataaatgccacattattaagaagggtatttgaatttgaataatcacctggtcttacctttagagagttcattgcatacgcagtggcattttgtctactaaatccacctccaacaatccctttacccttgcaatcaacttgtttattgatgcgatattcaacttgtctgttagcaagataaatattcgaacctgtgtatggactcaacgcacatcgaataaatgcgtccgcatcgtcataatttgggtcgtcacccagaccgccaaaatcatcaattgttggaaaagcaactgtgattttcacccaattcccgccatttgcagcaacaacaatataaccgtctggaacttttgaactatcagcactaaatacaaaagtccccccccctaaatgtttatcttttatcacagatcgtacatttacggtgcggcccggccatggcaatgtagtagctaaatcatcaatacaatctaatgtactgatagtttttttattaaattccctgagattttcaccagttaaagtcagcaccagtgtatctatccacccgttttcgcccgctccagctgctgccgcaacttcaattgcctgtttcaaatcatctactgaaacatatcccactcccaacatctcttcaaaaagtctggaaagcatcggtaatgatttaaacgggataccatatcttggctcaattagtgcgtctgtatttacagccttgcctgtatcttcaatatccctttccaaattttggaaagtttctggtgttaaaggcataaaaattctccaaaaaaaatccccgctaatgcggggacttaaaggactggtatttaaacaagattgttttttatgtcgctatcgttttgatagtaacggtcatcaaggtttacgagtgttaattcattttcaaagacacctgacctttgtttagtagtaatgagaaatagatcgtcctttttccgatcatcagttgaaagtgaataaactgtcttaacttcaccttctgttacaagtgcctcaactggtggccgtgcaagcacaaactcataatcattttgaccctgtgtcacagggatgatgtctatatatccgcttttaagctgcaaatggattacgaatgaatgctcggtagatagcttgcaaggctgcgaacctgtgatgtttaagccattccaagctaaaacctcgcccgataaaatcgcttgtgaaggatcaccaaagaatgttggtgcgagacgagtatcgtcaaccactgcaactggatcaccactaccaaccaactcaccttctgcaaaacaagaaaaacgacaattaattgcttgaaattgaattttgttccaagcacgccacgcaacaatatgtgcttgctgcttataaacaattccatagccttcaatttttttcgggttagtgatttggtcattaggaattttcaaggttttttcaatccatccagcttcactatcaacgtatgtcatctcaacaccgtcataattgttttctggttttgttcggattgtcctaacttctgtacgggcctttttatttcgatgattgaataataaataaggctctcgacccgcccgctcaagctcaaagtaaatctgacgatttagacggcgatcattacagcaagagacgcccgccaacattcttagaatctcttcaaatgattgattagcatcatcaattgtgtaattaaactcagccatcttttctgagccgaaataatcgacaacctcatcaaaaactgaatacagtttttcgacatttacttcattcaatgttcttcgtccaatcaacttatgcaaagctaattcaattactagatcaggaataaatcttgaaggtatgcgggtatccgacttaacaccatcacggtatgagtaaaccagactttctgctatacagtttgtcattcggctatcaatggccgttgctgcacgtgttgcttgtgtacgttgacgaattaaaactcggttgtcatatacaagcttggataagtaatgatatgcgtatgcggtataaaacttagtttcgtctgatagatctacagcgtcaccattgtcatttgtacggcgcgctcgaaagcgcactgcaccagtaaatggcaatgtaatccacattgagccgccgacactatcgcggttattcgctttaccattcaggcgtattgtttggttataaacattgcctgttgggtttccgtttaatacttgctgatattcaacataaatatctacaaacttagcatcggatccctgataaataccattaagcgcctgaaagttgagtagcaacccagtagcttttgctgactcaatcgtaaaccatccaatataattttcttggctacctcttaacttaatagttccaacacctgttttttgatctgttaaatccgcaagtttattccagtcatcattcacagcactcggagtggctaaggaaatttgtttgttcgttatatctacaccggttacaacataattaccatccaagaaaatgtttgctgaattagccgtaaggtttgcagataaattggccgttaaaacttcggtaagatttgcaaagtttgagtttgttgaaactggattctttaaatgaatcgtataaacaccagacacataggtaattgtgtcaatatcatacaaacctgcaagatctagttgcccattcacaggatcagttacaagcaaggaagttacattgattttgcggtaatcttgaaagtctacaacggtttggtttgaagcaatcgaaaatgtattattggtattgtctacatcaacttgcccagtaatagccaagtcattaataccaaaattcgccccactaataattaaagagtcattaatatcaaacgcattaaatttatctgctgtaccttgattatttgccttaattaaatttggatactggaaataaatgtcactcgcttcaatacgtgtgctatttggcggcaaaagagtttgtccgttaatagaagcattttgacgggcaataactggcggctggtcaaatgtatcaccccacttaaatatagtttcattcccaattaaagattgattgtgtccataagctgaaaggcttgtaccgggtatctcttgtatcggtgtgtcgcccgacttgaagttagaaacttgaacggggttttcacaaatacacatcaaagattcttcaacttcgaccccatctttaaagtatttgatgactggagcaaaaagatctggaatagctttaacacgccccaaaatgaaaggtatacgttgttttaaacgctggcggttctctggatctgataagttattgttacttgatccagacattgagccgttattgctcatgtttggcttgggaactttaaccaaagcagaaacagcagaacccagaatctttgttgcaacccatgtcacaaatgagcttaattcacccggatgacaaacaatactgcagtcatctgcaatttcggttaagcgcgcaattgatgccttatcttttattgatggtgttatgtcattttccgggcaaggattaccgagataaatttttgcttgaggaaattgtttttttactttaagaaattcaaacagaatattatctgtatcgattacatcaacttcgttcttgttgagagagttctggtaaagataaatttggctcataatatcgaatccgactaaaaatactattcgcctgctctacagtgattctctgcggcccgcgttcgatcaaatgaaaaattcgaccctgaaaaaaaagccccacgtgggagctttgatctaggtaagtcattaagacaatgcagccgtcttccggctttttgatgtgcttgtttctgtgaaccgtattacgtgatgtttttattgattcctgtaatggtccggttaagcccaagaaacacggcgtgtaatctttctcaaaaatgacctttgcggccaagatgacgaaatgcacgcaatggaaattttctggatcatagacacaataaaaaagctgacgaatattcatgagtaaaatccttcaagacttggatctgtacttgcagaataaatttcaccgttacctgaatcattcaagcccggagcttgcgcctcaaagctagtacctttccaatcccttgtaattacaataacttcaagccctttagcatatgtacacggcaggtcatatttgccgataacatatgctctataattcaatatagggggtattcgaaccgagtcttttaaaacaagatcaaccaagtctgggatttcagatcctacatcaccgatagctgccgtaattttttgatccaagttctcctcttcattactccgtgtaatattgagaggagcaaaagaataggtaaaagtctgcccatcctcatgtgttagatccatcggatcactactattcacaatatatctaagtacacgaggccaattagggtgtgatacttcgatacattcaagcaagccgactggcccggatgactggtctaaaactgctagcatttcatcagtaataatcatcactaaactcctgtagcgttcgggaaccattcatttggtactttttcaattgtgcctataactgccgggcctccattttgccaagcctcaataatgtccctgtcatttccatgatcacggtgaataggcttgattcttagctgaaaactgagttgaaggatttttccatctcgctctacttcttttggacgcgaatctgcaacaaatctgcactcgcattcctctagccttgcattgtctaatgctagcctccaaagccagttactaggtttgtactgcttgtcacgccaaaaagcccagaagtactccttttcttcctcattatttagagagatagaaacgtttaccgtgtgccaagctcctacaaaaaaagggacctgtcttggaggtcccccttctgtttcttgctctcgcaaattgctgcccggtgtaaagtcatacccctttaacaacgggcagagcatgaacttatccaatttttaccccctgtttcttgagatattgaaactttcctgcattgcttggctgtacttactgtttgggttgtatacatcatcaatagtcacatacaccttcccgtcatcaccaacattcgtttcaacatttgctttactgttgttgtaaaccacaacttgaggtccgctatctttttgattgttcaaatagttagtaaggtccttgttttggttgggattcaatacacgctcaccaccatcaagcaaccaagtcccctctttgggcacactatcaataccattgtgcgccatacctgtaaggtttacagatttgatctgagctgcttgtgcaacttgtactgctacagcagcaccagccaaaacaggtgcaatgtatggcccgatcattggtattaatgaagcagatgtataaacgtttgagtaagtctgtggtgcattcataattgcttgagcaactgcaaatgctttagacatggcaaacatggttttataggctgccgattgttcacccattaaaccacccattaaatcagccatcccccccaaagtttcagaagcaacccttgctccaagtgccgactttttaagctcataattttgatcgatcataaacatacgatctttatgtgcttgccaaattgcctcttgttctgcggctgactccgaaagagctgcttgtgcttctgcaagggccatagattgtgaagtttgcccaagtctttcttgatccagttgataaagatcacttgagccatttaggcttgcgttagtgctatcccacgccatgctcgcttgggttgctttatctaactttcctaattgctcttgagcttgtagtaacgcaattcgcttttgctgttcgtccttagagatttgtgaattaagtaaaatctgcgaacgctcgaatgaaaagcgtatttgcatattttccagttcagttcttaaaaatgcactcgcatcacttaagcgttgttcttgagcaagcttttcccaagctatttcctgttgtttttgacgctccaaagctgcagtaatttctgctttttttgttgtgtcatactcaacatttgcattaacaagttgcttttgaatatcgtaatcacgttcaatttgctttatacgatcagtttcaaaagagaagtattggttatactcctgttctttttcagcttttaatttcgcaatttgagcggcatataaagcatcctcttgagcaagtttttcttttagctgcggagttccaccataagcaaatgtgatcttatctacattatcttgatgctccttagctagtcgttgagcttcggtgtaataccgagcatcgacatcttttttagcatcatcaatggctttttgagattcagctgccttattaattaattcaagttgatctgcctgtgtaggcattaaaattgaattgtctacagtagattttccagatactccggcgaaccacttctggaaacccggtgcgtaaccagcaacctctttacgcttgctatctgatagaccacctctcaaataagttcttaagccacctgcacccgcattgtaggccatgagtgctttatccatggctccaaaatcagccaaatgtttagataagtctttagctgctgctgttgcaatttcttcagtagaacttttggcattaagtccatattgctttctaaacacactcgttgtttggaaaagaccaattgccccggtaggacttcttgctccggcatcagctccagattcttgaagaatcaatgcggcaagtgttccagcaggcaaaccatataaactttcgatttgagcaaaattatttgtctttgcaatgccttgcgcacgagcaattgccgccaactcgtctttactaaaagtataattttttagattgaagttttcgcgggcagcaagtagcacatcctttggcaatggtgctttaaaagcattttctccatttgctgcgatctgtgcatcagcatatgcattcgccttatcaactcctataccttctcttacaagggtcttgatatatccttctctaagcacatcttgtttggcttgggtaatgtagtcacgttgtttctgtgttaaagacatccatgcttttgcagagtcattaactgcctttgcttgatcttgttgcgccttagttgtgtcattagttgcgtttttaactaaattttggatctctttttgacgatctatagaattatttgcctcattgatttttgtatctaattcagcaataaatttaagagtagtttcgctaaccaatccctgtttttggagatcagagaaagctgttttcgctttatctccaccttctttcaaactcttaagatagttttgaataccagttaattgtttagtgtctccttgaactcttaagtcgttctcaaattgttccaaagcgataaacaaactttttaattgtttagtttgtttatcaacttcctctccagcttcgatacttttaagagctagttgcgatgctgttaattttttatatttttcccttagctcatcaacaacaagaccttgatcttcaagtgcatcagttgcatcttgcgtctgtttagacatcaaataataggcgccaccagctacagccaattgcgtaagaagcatgccaatcccagcaggaccgcccaataatgccattacacttgttgttgcgccggctgttctagcgaagtttgctaaacccacaccggcacgcactgcaaacaatgctgtttgtcctaattgataggtcgccataaccaaagctgggacaaatcgactagcaataccagcagcaactgcaatcgtaaccgccttaatgtcgtcccaattctctatcactgtttcgatagcaggaacaacactatttacaagtcttgcctcaacgccctgccattgcaaatccatcaattgaaggttttctcttgcttgagctaggcttttaactaagtcgtcagacataattgcgccagcacgctcagcagcatcgccccattttttaaaaccttctccaccattttctaacaatggaataagcaatgaagaatctgaaatgattgcttccatatagaacttcatgtcgttcgttgaagcaccagctttttccaatgagttgtaaaataattgaagcgcatcaggaccagaaagtttctgaaactgttgaattgttactccaacctttggtgcaatattttcaaagaaatccgcaagaggaccaccgcccgtttgctgaaagtcgcctatacgatcctgcatatccttcattttatcggcgaaggattccattgagataccagcagtttcggcaccctttgcataatattgaaaatcccgcacagaactgtttgcaagtttcgaaaacttttgtatgtcattacctgcctgaatgactctgtcgctatagttcacaagctctgcaattgataacccagcaatagcaccacccaatgcacttatcgcaatagctgcaacatcaaatgaatctgcaatccctttacttgctgacttcgctttgcgttcagcctgtgataaaggctcagtaaagctggctgtttgcaccattaaatcaagtgttaatctgccaagtgatgttgtggccattacctttctccgggcaataaaaaaccccgctaattcgcggggttttttaaattaatatttaattactgcttgcagtcaacactccaaacttgattgaatgcagctatagaggttgggtcagagttatactcattttcaaaatatattttttctttggtaactatataacgttgaaagccggtgtaagcgccaaaactatttttagcattaacttcaccgcacaactcccattgattacgaaacttagctgtttcaccatcttttaatttatctttaaccaatttctgtacttgcaaatcaagatttttcctttcttcatcaagtttttctttttctgttttcccacatccgagcattaagcaactcaaaatagcaataattaaaaacttattcatgtgcacaccgtttttcactttttttcaatttaacaaaacggtgtgtaaatgtcacatgccccaccttatgatagggttagttactatgatacttctcaaaatactcctctaatgacaattcttcgtcatcatccggaggtgtttcatgtggcataaatatataaggatctacttttgtaccttctttaaccttaaatcctgtgtagtgagccatccaactaccaaaactttgctctagccggcgacctaagttaagagagccgtatttttgacgataggctctccaaaacatcacctctgcatgactaagattctcttcagcctcctctaaggagcctccaccgattccgttgaggacaagctcggcaaagagttctctatctgcaaggtcttcttccgtgactttcccataaagttattaacttcatcggcagctgcatatagcgcattgatcaaacttggctcggctttatagacgtcgttcacacttgagaagaaaggcgttcccttttgatcagagcaaattgaaccaagcaactgagccgattgcattagggttgagtcaacccttttaacttttgaatcctctggattcttatagttaaactcccactcgactgctttagaaacctctcggctctccttaaagctcatttttttaacaaaaacatcagcttcaagttcaaccgtttcaccaagttctaacaatgagtttttggtcaattttttaagtgaagcaacattactttctgttacttcaacattccatataaccgtttttttaactggaacgttcagagtagttatactctgctttaagtctgtaatactgatcttagccattttatggagtcaccgtacgtttagtataagttacacccgaagttcgtactaaagtgaactcataaccgattactgtatcaacttcgatgtcattaggggctgcatcatttagatagccttcaaatgaccaccaagaacgagtttctggcagatcaatacctgtagttgcatcatatgttggaggcgttgttgagtggcttgaacctacataccactgtagcttttcaccagatgcagcaatttccaataatttgtcatgacttgtgttttcatcatccaaatcaataccaattgcaccttcacccggatcgcgcatcccgcgttcatattctttgacatcagcatctagacaggttacatcaatctttccaaatgagtcttgaccaaacgaaatacgcttagggcaaataaaacgcacaacggttcccgcaattacagtaaataactgcgttttttgagctttaacatgtttagccattaagagcgctccttaatttttggcataaaaaaagcacccgaataggtgctaagtgaaaaaagttttgtgttttattcgcggtttacaatccaacttacatcaaaagaatagtgaggcattcctgttactgggtccttatctgcttcgccatagcgaaccacataacaatcaagctctattgcaaaacggattgcttctgcaacttgatcaaccacatcttcatctgttgcataaacatcgatttgaacaattgcactgtcggaaacaggccgcgaatcaagactgctatttgaatcacctgaaataatttgccaagtaacatatggtgtttcaggctgttctggagcagatccaaaacgccaaactctcaagatattattactttcgagtaatgctcttactgctggatctgctcttgctaatttaaaaattgggactttaatcattaagctgcacctaaaaccacactgagttcaaaattaaatacttgaacaaacttatctgttatctgttcaatgttttcgtaaagcgctggtcttaaaaatggggtggcgggctgtctacttgtacctaactcaaggaatcgccagtaaaagactcgcccatctgtttgatacgtttttccaacacgcccagaacgtctattttgggcattatttgtatatggaatacgtgccccaccacgcactcccacacgcataaccaaagtgtttttatttctacttcggccattttgaacaacaatttctttccaaattttttcaggagtggtgggatcatctaggcgtttaactttttgacgggcttcatcccgagcaatgttcattgcctgccgcatcgctttacgggcaatacgttttacagttttttcgttaccaattgcctgcatttttcttaaagcaggctccaaaccatgtatttgagtagccataaatcacccattccatgctttatcacctgttgcaaggttgatagttaaatactcacggcgtgagtcgggatctcgcatagggttaccatcaatcttgtaatagtaaccatcaaaaagaacccgcattgtgctatcaacttgttttgtagcgctgctatatcgcacttttgcacgggcttgtatcgagctattggctgctttggctgcaataacatcccttgttgaaaggtcagtaacttctgcccaaattgttgcaaaattagaccatgaggtgattaattttccagtgttttggtcttgggtttggatgggcttttgaatagtgatgcggtgctttagttttggagtaatgctgggcatattagacccccatttctctaataggctgcaaaatatcccaatatgcttgaggttttccttctagacttcggctgtacttatactcaataaatatcaaccgggcattatctaacttcttgcagtccacaatgtccgtgtcagaagttctttctgactcatttgaaataatttttcggtcgatgtcgatcgctatttcttcatcggcttgagctatccattcaagaaaaagcacatcctcatcatcgtgatcaactcgacattgcaacttagctcgttcgagtgtgatcattttgaattattccgtcttgtagctggttttggtggatcaacttttgtttggtattcacgtaaaactttattttctaccaaatgccttaccacgtttggatctgctgtgcgaatatcgccctctttgtagtctttatctccaaagtgtgggcgtaaaacttcatattctttcattttggcctctctaaatgggatggtgactaacaccaccccaaaatgaattaaccacccgtagcaggagtataggagccatatacaagcgatttaggcttataaacagctaatgctccacgggtttcagcaagtaaggtacgtttatttgatgtgaaatcatcgccctgcataccgatttgcacagcagcaccccagcgctcaaagtattgagctgcagtattgaatgcacctgttaagaatttacctgcatccattgcagcggtttgaactacaggcaagccccataatgttggaaccgcttgtgattgcggattcccgatgatgtagttgccgtttgcatctttttgcgtttccatcaacgcccagtcaattgggttgagtacatggccgtttgcaaagtcatcggccaatacaacttgaagcattgcaaaacgcaatacatcaaacatgtttggcgttgctggagcacctgcaggcggagcataagcagtcgcttgagggattaagccaagcatattgccattggttccatcaccagcaagaatttgcttttcaagcttgatgtcaagaccatggcgcaaaatgttgtcaatgaatgactgcaatgctggtgcatcacttaacatttgagtggtcgtttttaaccagtgagcaattacaactgctttggcatctttatcttcaaatgtaattccagattctggcttgtttgcaccttctgcaactactgctgcattattggtgaattctttcatttgaacatattcaatgagattcccgctcatgctgccacctgccaaaatgtcgcggatggtaaggcgcatttggtttggtaactgcaaaccaagattggtggcaggaataatttttccaacctcagtcgtaccaattgtgttcttcagctcaacacgctgaattccacgatactgactttctgcagcatttttgtattctgtagtttcaacaaactcaccacccatggtttgctttttggtttcaacatcaccattaccacggcgtgcagctttctgctccagttctgtcagtttgtttttaacttcatttaacgtagttaaagcttcgtccgctttatctttggcgctttgtgagatttcttcactttttgcttgtttgcctttgaactcttcggcgatttctttaactgtatcaacgtgtttttggaactcttgagcgagttgttctaaagttttttcagtcattgctgattcctcgtaaaatatttaaggcatttgaaattgatttcgctttttcgttttcaccctctgactcgctcaaaagatgacgcaaacccttactagcgatgacagtggcttgcgtttttgaaaatcctgactctctcaggaacttttcaaattctggtagggatggcagctcgccatcttgtaatttggatttgacggaactgattagggtttctggattggaaggaaaggcaacaattgaaccttccactaactccagttccagcagttcgcggattagtgagtctggatcgcgcctataagacttggtgatatagccaatggacatgccatcaatcgcgccaaccttcatcagcgcataaatagctttagctcgcggcacatcgtcaattaagagacgaccttctacgtacaaccctttttcgtcttcacgcatttcggtaaaaattccgattggttcagatgggttgtgatcccaaaagattgctgggtacttgccttttgccttccactcttgaagagttttggcaaatgcacctttgcggatgatgtccccatgagaatcaaggttgtcaaaagcagctaagtagccagaaaaaaagccaccctcttgggtggctttgatttctaaagttagtttaagtctatccactggttttcccttgatctttcaatccgaccatttgcatttgaaccattagctcatcgccacccggtaaaggcgccaagtcttctaaatcccgcacttcattacgcgtcataacaccgttttgaatcatgtttgtgtagaaacctgagcgagtagcactgtcggcccgtaataagccttcaaccgcaaattttggccggtacttgtatttttcacttggcaaaaacaatctctttgtgattgtttgctcatatctaactaattgagggttaagcgaataggtcaaaaaccccctattagtctgctcaagacttgaagcccatgagcttgctttgtttgtatgaccaattaactgaggaggaacaccaaaggcgcggcatatttcttcaatgccaaaataacgagattcaagtaactgggcatcaacgggattgattcgaatactatttgagccagaaagcttcattccagcctcaagcaccatgtacttaccagcattctcaggtttactgaactcacttaaatggtttcttagtctttcacgctgctctttagttaaagtttgctccccagtttcaaggaagcccccaacttttaagccattcttaaaccagtcctgagcttggttgtttgcatcaaactgcattccaatcgtttgagcaaaaaactgaatagcagataaaccaacaagcccatcaagagtaaaacccttgaaatgcaagatttggtcttccgaataggttgttgttttcccattttcagtgtaatgaaaatcaatcgctcccaaatcattacgttttacaaccataccactcgggaaaagtggctcaagagcaattacttttccgcttgagtcttttgtaataaggttgtatgcattcccccataagtcaacacaagcaacttgaacttgccaaaactcacttgcacacatatcggcattgggtgaatcgtgcaaaatacggtaaaggtaatgatcagtagcaagacgtttattgttgtcgtacaactgtaaaggaagagttgagatagtttcagctcttaattttacacacgcccagactgcggaaagtttcaaagctgtttctggtgtgacaaccgatccaccgggtgacaaataactatcaaatggataagacgaatcgcctttttttaattgtgtatttccagtcaatcgtgaccagaagcgggaccaaaaccccggctcttgtgtggtactcatgctatcacgacatcctctaagtattcgtcaatatcaacgcgattggcaggctcaggattgcttgacatcaaagcaactgcgttaaatgtggcaatcaatgggtcaatcttcccaacacctgattcttgcttggttattcgcataccattgccgaccatcacgacacgggcattacctgccgcccaagtcattagctgttgtccagcatggtgcagattgccttctgccaatttgcgctcagtagtaaggatgtaggacatgagtttgtagccttgtggcacagcaaacatgctttcctctggaattcctgcctcaagtaagccatctaaaagaccgcctaagcccaatggatctagtccgatcttattaagctttccactgtcataaaccttcttagcaattgctgcgagttggtcaatgtcatcgcctattcggtcaacaacagttagagaaccctcagacttgaagtcttcatacttaggcacattctcttttctgcgctctaaagcaatcttatttgcccatgcatgattccatagccaccagatacgaggatcttctgttaaacgacctaaagcagcgaagccaagtaagtcgtcgagaccaccgccatcaatacccaaagtaatgacatcggatagctcaattagttggtcgatttggatatctttagcttgagcattccaatactctgcacccgcccaccggttagcacgaaggttcatgccgatttcaatgtttaagtgtttggccaagaagtctctaagagattcttcactagcatctttaactttgttaaattccgaaatcagatattcaagatcaaccgaagcacccaagtttgggtttgtgatgtagaaattttcaggttttaaatgttcgcctgcttctacaagatgcttagggaattcataaataagtggtagaaaacttttatcaactttaattccgtcacgtacatctctggcataatctaaaagctgcttaaatactccacatggcacttcatccgacatggtagacagataaatcacacaaccttctggacgagatgctaaaccaccctttgcttcacggaacattgattcagcgttggcacgtttcccgaatagccagacctcatctatcaaaatgattgaagctttcttaccagctgcagcgttagattctgctgcaataactttaagtgttgctccggtacctagatgcgtaactgtttttgtgtgctcagatacattaaatctttcacttaattcttcatctgcgcgtatgaaatcccggattggattaaatgagttatcagcaacttctttagtaggcgcaagaataattagttcggcagattgtcgatcattaagaattaatgcagtaagcataatgccggcggcaatcgtagatttagtattcttcttcgaaatcaaaagaaagaattcacgaattaatctgcgctttgtgcttggatcatatgcgccaaagattgcacgaacaaactcgatcacccattccaatgtgacatcacccatcttagggctacccatcacatcaacaagaattaactctttaaagatacgctccgctacgtcagccactttggggaataatggcttacacggcattaacgattgtttagaaacaatacgggtcgcccagtctgggcaagctgtagtccagtctggtagttttgcagtcatttaaatggtccatgaaaaaaccgcccgaaggcggaataaatttgtatgacaggttgcgaacccctgctttaactacgctgtttcgcccactgctagcgggttattacgttggcagttgtggtcctccttcctccaacgcaccgtatcgcctacggatccatacaaaaccttttattgattaacaatcaattgataatcttcttcggaaaatctggaaaagcacttgcgacattgataagtaatcttcaccaacctttctgttgctggcaacttttcaatagagtcatgacagcaagggccatctttgatattttgaatagtgatagtttcaccacttacggtttcgtattctagactttgcatgcaaagttcctcttaatagttagcttggcaactgattgtccaatgtggcgtattttcctgttctggtcgcttcctttgccttgtcttgtttagtttcttttttgcctttttccgcaaccttcccgtgtttataaggcaatgctgcaattgctgcttgcattctaagtggcagcttgttgccattgaagttcatgaccttaattaaaaaatctaaaggatcatcaccttcaaattgaaattcctcaatagggttttcatcttcaccactattttcgggtgtatctttaggtttaacttttggtgaattagatgttaaagagcgcccttctttttgggcctttaacatttcaatatagacaataatttcaggatcttttgctaacctagcacctgcggcggatgcagttttttccgcataacctgctgaaattgctgcttctttatttgtcttgccgtcaacaatggcaagagcaaatttttccattttctctgttaatgccattgctctacctttaacttgattttaactttttgctttaactttttctgagagggaattttttttgtgcgtgcgatggggggcggtgtccaacggcgaagggcttggaagttttgacatcccccctgcctgctggattttttgcatcattatggtgcttcctgaacatgttcaagaatcttcttcttgccatcgtcattcacaacacaacaaatcaaactaccgcttcgcatatacaacatagcgttataaatgtattggctgtaatctttctgtccattccaattaaaaacggcgccttcaaggccctgtggatcaaagtagatgtcagagcctttgtctgcatctttcacatgaactagttttgaagtcattcagccatcctcttctaaatacttttgaaccaactcatcatcattcattgccggctctcctgttgggttttctttttatggcatggaacacaaagagactggaggtttgattcatcatccgttccacctcttgccacattcacaatatggtcaagctctaagtctttagtgacgatgccacaacattgacaggtccactcatcacgtaaatggatcttagctttaagacggcgccacggacggccacctcgaccagaaccccaattgttttgtttagggttcttctgggtttgtgcgggtgcctgtagcgtctgtaacttgttcttgaatgtttggagtttcatttaagtttactcgcgcatctacaccattaagtaagtcaatggatatccaatcgatatccaaaccgtcacgttgataactttgaaccagtttaactaattcaagctccagttctttgcgcttcaattcaggagttctatgctgttcctgcaaatacaaaatggttttatcaaacgacttttgaagatcatcatcaattacaaagaaaggctggcctctattcattgtcttcacccatctagtgatcctgaccgttgtgctggttcactatcttcaagcattgatagaacttcggataactgagcagattgttctgcattgatttggacgatcaagctattctgttcaatcaacttattgttttgctctatcagcttaagcaccacgtcttgcaaatttgaatcattgctcattttgataacaccacttaaggtcatccgggataatcaacatcacgcccaagtctctatgtgcataaatgttgatcttatccagatatttggtgaattctttaatggtggccttcttgctttgcaggtggtctttaatgaaggtattgaccaaaacttggtaatccttttcaagttgacggcgcttaggtccatcgaatgcttgaataacatctttaaagttctgcaaagccatgtacttttctgcagtctcttgccgaccctcaacatagatccgggcaagaaactttttcttaaaaagtaaatgaagatcatcctttgaattaccggtcttttgcctgatctgttcaagccaagcccagtaaagccgattttgtgcggcgctcctgtcgtcttccttctgattgattctaacgactaaaggtttgccttctgcggctgctttggagtggttattgttcagatagttaattacctgaacaatcccagaataactattgattgggaatgttgctggttccatattcccacctataccttattcatccacaacgggacgtttaccagcttctaaaactggaatgtttgcctcagttgggacatatacaatttgttgaatcttgccatcacgtaaagcatcaccaaacgcaccaataaactcttgtttgcggtactctggataatcttttgcagcttgaccaatagttttgatcgcttctgcacgcaacttggcactttcaagttcagctcgcgccgtttgaacctgaatcatttttgactgttctgcttctgccaatagtgcttgaccattcatgccttgcttccacactttatagtgaggccatgcaaacataatcaaaacaatgacaattaaaatggcaagaaagcaaagtgcggctaataccacatcagcttggcctttctggttggttttcatttctcgcttcctttttctaggcacaaaaaaagagcctttcggctccgattaaactaaaaaccacccgagggtggcttaattctttctagtaaattggtttaccattttctctattaattcttgtgtgagattttcagggtacgaaatcctaacctcatatccaacaatagttatgatgccataaggcccatttgttccagctattgggtcatatgaaccatcatccattaatactttgatgaaagaaaaattctcaccgtcatatacagcctcataatcaacatgcttaaccattgtaaatccttacaccaattacgttggttaaatcatatcaaaataaatcttgttctgactcaagcattgcgttggttcgcttaagccatttattaaatagctcctcgctttcctgtctgctccctagttggtaggtatcaaataaatgatggcaggaaaaacacatagaaacagttttagagtcgcaagccttaatggatctgcccttaccgtctttactagaattagaatgcgcggcttggcttggtgctggtgcaccacatctcatgcatggcagcttgcgtacttcggctaatcgtttggagtcacgcattcaacatggaccgtaaattattaatcttgtttttcaatcgcattatgatgcggtctataacaagcatttcttcgagactcaatccagtacgagataagttctggtaacggcttaactcttccgaatatttatcaagattctttttggcttcgtttgtatccatgttcaccccaatccatttgacttagacgaagtgagctactccttagctttgatatccactttggcaagaggctatatctatgcagcacacttctctaaattaaatggcacgccatgcaggactcgaacccgcatcaatcacactagaattatgatgtcttatccaattagacgaatggcgtaaaaaataaaagccccgcaaatgcagggctgtaaataaattcagtttaattttcaactttgcagatgagcatctaatgctttttcaagacttgggatttctgtgccatctactctgccatggtagccttttaaataaattaaatatctcgtgtcatctctatctaaatgatgatagtaaatagaatctacattaaccttacctgatgcaacatcaacaccatcgtcattgatagtatttggataaaatggcgtaaatccatcctcattaaattgcaattcaaatgaaccatcattaagtctaattgtttctaaacgaactagtttcataccacaccattaataaagtaatttgattaataatgcggcatgttaattggaaatgcaacgacttgatttaatataagtcattgtattctcaatagtaaattaaattactttaatctttccacactttctgcattctttctgattgaacatgtcggattcacactcccaaacatgaaaacagaatacctgcctgatgattcggagcatgtgaacctccaaaaaaatagccctacgtttaagcatcgactagaaatccagtccagcacatcggaatccaatgttctaagctcgtagggcataaaagcaaaaagcccaccgtttggcgagcttctttaagatcagtgacacttgcttatacttcgtaccacttatcacgaatttaaagaactattggcgccaagtcaagggttttctttggttttcttactttggcttgtttttcggttaatttactccgcaatgtattacgttgcccaacaatataggcaataccacactttaaatcttgtctcacggcgttacgtgagcatttgctaatgtcagcaatagtttcctcactcaacccatgcacgtaatacaacactacaaaatctagccattcttgtaatgttgggtttgggttcattcgtaaatcacgcaataatccacttacagctctcgcctcatcagtagagattttgcactgtggcaatgagcgctttcttgcatcacgctttacgccttctacagaatcaatcaagtaagttaaggtgttacgtgtacccaaataagtttcagcattatcttcattaatccatgccccaaattgctctaaccaattctcaattgtgtacttcttccaattacaagcttgtaatacatgcggtttattattcatcattccaccttaccttttgcttcactttctttcttgaattgatctaataatttatttctacccaacttcacatacaggcaagctgccgctcgtgtttctggtgttcttacaccatggttatatgcacaacgcagggccatcatctctttgtaggtccatttttcattcatgcctcaccacccttgagcgcttgctctaacttcttgccaatctcaaacattgaccagctcttttgaaggtctgatgcaatagacatagcttttgcaatgattagtccttgttgatccacccgcttttgcagctctgctttctcatctcttaaaccaagcagtttttcagcttgtgtttcaatcacttcgttttgataaacgagcttttgaccttgctcttttatgttgtcgttaagcatctgatttctgcgttgcagctcctccactttcgcttgcattgactgctgaccagcttcatatgcctcctctatgccaactgaatatggaatttttccgttactagaacaccactcaataaatgtcattggtttatccatctcaaacatcctttgatttacacagtgggctgatgtggttttctatggggaagtcgtcgcccatatcattgtcaatgcggtggcctgctgctatttcttctggggtggcgtggcgaatatctgcataaggagggaattcactaaaacacttagctcctgcttcatcccagcattcacgaacaacaattgagtcgtccaaaacagctttgacataaaacaatctttgatgcggcaagctgtgatatacgatcttttcaccaactttgtattctttaaactcactcatggctggctcctttttctgcatcacacgtttcacatttatctatatgcccccacccatcatctcgaatgaagccaaaccccttacaagccttacatttgactttctttttctcacccaccaagaaatatcgatctttctggttgtaggtaatatcaatagaacctgagtaatagcgccttaacgccccatcaatatgaaattcgtgtggacctacacaaaacatccaccccgaatccccgccgcactttgtaaaccatgtgaaatatgcttctctccatttcacataacggtcagacagatgaggagtcaacaattcaattaaacgtgctctaagcatctccatgcttgctgacatatctccatagtgatattcaagatcgtagctatactcgcctgtgttatatctagttggcatgagattcaccgcctccatatattgattcgtaatcaacaattgctctttctaatgcttgcttcacttcaggtgcggtgtaaggtgaatttgcatatatcttggctctttcaactgtgtagtgctcaatcaccaaagcaactgactccataagacgcttgaggtcatccatgttcacaagctcaattctcggattaaaacgatctgaatacttttttgctttggtgcagtaacacaatgttgagtagtagcactccatatatttacttgggatgccttcaacaacctctcgcgccttatccaatccttgctcacgaataaactgttctggtttcattggctgcgctcccacttgtcataacaataaaaatttagaaacaggattagtaaaattacgattaaatacccccaccaaaattgcttacgcccacacaaatcaagaagggtcaatgtgcaaatgaagtaaaaagtgctgtccatgaaggccaatggaaaacgaaaggttgttcgtttgtttttgggttgatgagtcttggcaaccaaagctgctataaccaaacccagaaaagttgaaatacaaataagaaccatgattgataagaacgttttcatatgaagcttcctgaattatctttactttcaagagctgccaattgatcactatgcacatttgagaagcggctatagtccagctcagaacaaagaaaggttttgcctactgagccgtcacgcacttttgcggcgttcacttcaagcaaaccgggtgtttttgacttctcgccgttgtaatactcatcccggtaaaggaataaaattacgtcagcatcttgctcaattgctccagatccgcgaaggtctgacataattggtcgcttatctgatcggttttccaattgacgacttaattgcgataaagcaaacactgggcaattaaattccattgccacgcgcttcaatgaatctgagatataagtcaaacggtcattttcagacgcacttgctggcaaatgcggtgtaataattttttgtaagtaatcaacaaaaatggcacccagcgaaccctcttccgatctcactttgcgcgcatgctttctgatatcagaaattgtgacggcgccatccatgatcatgagaggcgaattttgaataacttttgcagcctcagtaaaacaagtccaatcttcgccatccaactcagcatttttgatttttgaaagtttaagatcccctacgcttgagatgatccgcttggtgattgcatctcttttcatttcgatggattcaatcaaaaccggcttacgtaaattagttgcaatattggttgccaagttcaaagcaaaggccgttttacccatacttggacgagctgcaataacaactaaatcgccgttattaatttccccaattcgatgatcaagagctacaaaaccagtattaaccccacgaactctgtattgaccgctcatcctttcagtttggatgctgttgatctcttccattattgaaattacagaatgagaaaggtgctctacatcacccttgttagacacggaattaatattgcttaagagggtatttgccttttccaaaacatcatcggcagatccataacccacatcatttgcataaatctgagtttttttgccaacatctcgaagctgccgtctaaggtgcaattcctccagcatcttgatgtatgacttaaagttgattgctttgcctacgacattccctaatagctcaatgatgtattgttcattgataccttttgactctgccccaagcgacttaattgctctcaaaactgtaagttcatcaataatttcaccacgctcataaagtgagcgcatagctttaaaaatcacttgatgagtatgaatagtgaataaatgctcatgcatttgtgccacataatcagcagcctcactaatcgtcagaattgaaaccagaacagaggattcaatgcttggatctgacaatgggtccttttcaataccagttacattcaaatcattagtcattctgtaccaccctcagcataggctttgccatattggacacgcactggcgttggtctgaaaacttgctgttcctgtggttgctcagaagactggtgcgctacgtttggctcttgcccagacataccaatgaaccgatcaagttttgttgcttcacggcaaattaactcaatgtcagtaaagttgttttgaaggtggtattcagacttggagcaattagtaattgccaatttaatgtcttgaactgtgtaaccctccttgagtctggcttgaatcttagttttacgtttattgtccaaaacagtacggctgtttttgttaaacgttgttttccagaattcaaagatctcttggatttcttctttgaaactctcttttggtttttcagcgggtacaggttcgccgttaggcggacatatatttatattatttcccttatgttctattacttctcccttaagagcagaattcgaaggaattccgctagattgattttggctttcttttggagttccgttggaattccgatggaattcttgtggaacacttgtggaagactcaacccaatcttttggacatccagcagctatccattgttcacttgttggaatatctatggatttcttgccttctgactcaagctttttgttgtatttccgcattctgtccgcaaattttgcgtagtgatggccctgttttgatgcccagctttcctgtgctttctcgcagattgttgggtgatagatgcggccatcattgcactctttccagccatgcaatgcctcagctttaacctttacccattccccaatgaagcgaccaaaacccgcaagatttgcaagaatacgatcatcatttggaagtgatccagcaggcacttgatgccatgaagcacaccaaagcaaaacacctgccttaaatgcttccccatctgtaatagctgtgaaatcgctgtctctgaaacgcaccacatcaagtggcatgtatgcaaagtcgcgtaaatccacatcactatcaattaatggatcaggcaaaattaccccgccatcaatagaattattatcgtgcattacaacttatcctttgctcttagacggttaattacagcgctctcaaatcgattcaaaagtgcataaaggtgagaatgtttttgcaggtccgctataacctccccaattggatgggaagttttgttgaaatctttttgaacgcccaaagccttttcaggttctttgcgagattccttgtactcagctattgagtctgcatatgcgtcatgatcaatttgccattgagtaaggacttgatcctcctcatcatatgggcttgcacagtctgaattttgtgctaagatttgttcattcattttggtttgctccaaaacacaaaaccgcctctgctgtaacagatggcggtttttttaatttaacgattgactcgatttgctaagtaaatccgcctttaaaatcccttttgattcaatttctaaaaaggcctgtgttcttagcggaattccttctttttcccacttccataaggtaattctagaaaccaacatctttcttgatagctcctgttttgagctacaatcgtggtagtccaataagtcttgaaggttcataggttaacttaaattatccataaagttaacttaagttatcatgctgggattttattttcaatatagtgtgttaatataagttaaccaattcactgcgaatattgttatggaattacatgaaagaattgtccagaaaatgaaagaaaaaaagttacgacaagtagacctagccttggcaacgggaaagtcaaaagtagcagtattaaaatggataaatggagaaaatgtacctaagaccgaatcgcttaagaaattagcagaattatttggtgtttcagatagttggttaatgcatggtactgaagaaaaactggacaataatgttgttttaagtgaaaagatgccatcagatggtcgtcctgttccagtgatatcgtgggttgcagcaggttcttttagtcccattgaaactgttttaaaagatactgaaattgaggaataccttcccccaaatcgtagatgtggaaaaaatggatatgcattaaaagttgttggatactcaatggcgccaactttcttacccggtgacagaatttatgtaaacccagacatacaaacatttgatttaaaaacggatgatcttgtaattgttgcatgtgctggcgactcagaagcaaccttcaagaaattaataattgagggagaaggctcaagtaagtttcttgaaccattaaaccctgattggcctgataaaattataaaactatcagaagattgcagacttgttgggaaagtagtaggactttatagggatatttactagcaaattcacgccaataataagaaatttttataaaatttgcccacttttgtgggttttttattatcaaaaaaattaactaaaataaatcaaaaataattattgacgcatttagttaatttaagttaacctaatttcacaaacacaaaaagccccacactgtggagctaattttaaacctagatgctttctctgtcctctaccaaaatttcagagcagcatcgctataactggtgctttattatgaaccaaatcacagatattagtcaacaggactgcattagcccataccttcgctcatcaaacaaaaacaagactcctgaaaagatgcttgcccaaattaatgcatggttgcttgatgaggacttttgtcattatttttcaattcaaatacaaggccaagaggtttatccattcggcgtgataaatcgtccgttctttcatcttgatcaagcagaaagaaagctagaaagcttaaaaagcgcaaaccctaaaatttgttactacatgagttatggtgcttttgataaatcaatcttagattttgaaaatgaaaatgcccctatgtgggagcgtgcttggcttaatcaacatgaattccgtttgatcaaattgaatgttgaaaaaatggctgaagaagatttagttaagctaattccaaactataaagatgttctaacttggcaagcagaacaaaacacaagtcaaagctgtcattactacttttctcaatcttttgatgattcagaaaatgagattaccacatcatcaccattctatttcaacctaaaagatgcattgatagctaagttgtattttgaaaaaacaatgcctaaacgccgcttcaaaattcattctggagttatgtctacacaaggattaatgaagcttgatggtggaacaagtgaacactctcaaggcttagttgatgctcacaaagagcgcttagcttcacttaaaaaataaaggggaataatcatgcgtactagttcacaactttttccagaaaacaaaagcgtgactgtggatgaccttattgcagctcgtagtgaagctaagaatgatatgggtgatatcaatgccctactgtccgcaattgagctaagtcttgttgaaaaactaaaggatcacaacttaagtaagtttgcctttgataaaacctttcgcttgattgatattgccaaaactcaagcagatttatctcaggattatcacaacggtgagcttgctcaattaactggtggtcaataccaacttgatgagttgaaaaataatattacacacctagaggttgtcccagagacgcaagtaatcaacacaaatcatttagctccagcgaatgcggccatctctaaaacacttacagaaggttttaagaatgacggacggcgttaattacgccgacctctctagggaggttctttttaaggcgtttttattatggcttacaaagattgggtatcgcggaattgttagaccttgtgggcgcatggagttttattgcgccacagtcagcaaactttttcctagaaacgtgcacatcacgtatgacggaaaaatgaataaggcagctacccagctttttaaagaatttgaaaaacatttgaaggcatgatcatgagtaatgtaattcgctttagacgaaatgggcttgcacataagatcagcccgcaagatgtaaaacaaagattaatcaacccaagtaaggatgttgatctaaagaaagcagatcaaataattggaattgattttgaaagcttgccacatgatgagcttttaaagttggctagagctggagctatagaccttatagaaacagatgctcgctataagaaaaccaataatgcaactaaacagattcttcacttgctaggtagattcttggatcgccgatctaaagaggaatggaagaagtataacgactccatgacactagattcagaagcagcagcaagagctatcgcctttgaggaagccaataacatcttgccagaattagcgggcagtacgtttgccaatgtgtttgcaaataaaaatgaggtgcaaccatgaactttttgaaacaagtaactcttaattataagcaccttcaagcaacaagtctttttgctgcacatcgtgaagtaaggttctacttaatgggtgtattggttaaagatggagtgatggccgcaacaaatggacattgtgctcttatctgtgacgctccagaagtaaaagatttagaggtgattatcccaattgaaatagttaaatcttttattaaaaaggtcggtaataacccaaaagtaaagactatcactttaagccaaattgatgatgaattttggttgctggattacgaaaatgggatgtttgaattcttccgaccaattgacggcaagtttccagatataagccgtgttgatattccaaaaccgaccgaaccccctaaagagtttgtgcagtggaatttagaatatgtgggccaattcatgaagtgctccaaaattcttaattgccgattccctctcttttatccatctggtgccactacttcaacttatgtggaatttgtggacggcgtacacggcctattgatgccattgcgagtttgaggagaaagctaatgttagatttgaataaggaaagagaggcttttctgaataccttccaatattacaaaggaagaagagatattatttttagtaatgagcatgaactgtttatgactagatcaaacaatccttctgaaattgctcagaaagaaataagcaacatgaatagacgttgggatgcttggcttagatgtgcaaagcatcgtgatgcagagctagaaaaagccaaagctcaggcggtgccagagggttactgtttggtaccgaaagagattccagacagcgttgttagctgtttagaaaatagtggattccattggggcgatgggactcgtgatcattacacgcctatttattctttgatggttgaagtggcaagcgaatcgggagctgagggatgagtgaattatatagcagtcaagctgtcaaagatgttcttaatgaaagagaacgccaaattataaaagaagggtatttacctgaatttgataatctctatgaagcaaatgaattgccacgagctgcatcttgttacgttgatcatgtagtaagtagaggttgggtttataacagcaaagatttcggccccgaagtgtatatggatgaggatgctgcaggatggtggccttttgctgatactttctggaaaccaaaaagcccaagacaagatttggttcgtgcagccgctttattaattgcggagattgagcgtcttgatcgagaagttaaagcggaaagtaaggagtaatgatgaaacgtttaaataaattagcccgcatgactccagaggaaaaatctgcacttaaaaaagaattttgggaagctgcaaatgatgagccatttccgccagaagtggtcgccgtggttctggatgtttcaacttcgcttctgcagcaaaagcgaacccatggtggtggaattccctatacaaaagtcagtccacgtaaagttctttacatcaagtcagacgttattgagtatgtaaagaaaagaaaaggaactaatacgtctaatgtaagcggctcataagccgcttttttaatgcctgtaaatgtagccaagatgtagcctaaaaaattaaaaatgtagccgtgtagccagtatgtagccacaaccataaaagccaaatagcgcataatattgtttaatgttgcataatcactaaaataatgatttatttaggcttttattgttgcataatattgtttaatgtcgcctaatgttgcaaagatttacaaaattaccttgaactttagggttcaagggtaacgacatgcagcggcatcttcggagcatttatttttaatagataacaataacttaaaacaaaatcccctacttaaaactctcttttttaatagaccaaaccttcaaaatagactcttaatagacttcacaattattgtattgtatcgttaggtattgctttgtattgcttaatttaaagatggctcaacacattaaatttactaaatcggtaatagactctattcctttgtctgaagagaaacaaatcttttacagagatacagtaactataggatttggcttatgtgtgggcaaaactaaaagctattttgctgaaaagaaaatgcctaatggcaagtctaaacgtaaagttattggaaaacatggcgtctatacattagaacaagccagaactgaagctaaacggcttcttatcttgatggatgaaggtgtagatccagttaagcaaaagcgtgatttacgagcttcagcaattcaaaatgatgccttacaaaagctagtccctacccttagtgaagcttaccaatactataaattgcgtaaaaagctggcggaaacatctttaattgcctatgacggatgcatagaaaactactttagtgattggaaagatttaaaacttgaccaaatcaccagtgcaatgattattgatcgtcatctgaagctttcgaaagcaagcccttcccgagctaatcttgcatcaaaatttttacatgctctctttaaccatacgattagcaggtataaggatgagtccgggaataaaattctaaatataaaaaacccggttgttatcgttaaagaagaaaaagctttcaataaaattaaacgtagaaaaggccatgttcgtgcagatcagcgcgaagcatgggcattggctgtggccactacttattggatgggtgaacaaaataacgattttagagcgtacacaaaccaagactttttattcttacttgctctaactggttttagacgtagtgaagcagaatctgttgaatggaaaaatgtagatcttcaatttggtaccatcaaaattattaatacgaaaaaccatgaggatcttttgctacctatgggtgataccctttggcacattatgcgtgaacgaaaaaaacgtgccggtgataacaaatatgtctttaccgatagaaatggtgtttcccatatttcagaccgccgagcagcacgtgacaaagtaactgagaattctggtatcgaatttacgttccatgatttacgccgcacctttggcactatcgcgaacagcttggccataggaagctatacgattaaaaggctaattaaccataccactgacgatgatgataacgatgtgactgatggatatattcaagtttctttcgatgatttaaagaaagctatgaatatgattgaagacgtgattatttctgaaccagtaaaagcattaatcaaaagtcgcttatatttcgagaaaaatgaatcgagaaatcaggctcaagaattaattaaccaccacattcaagtgttagataactttaaaatggcaggccaaattctagatttttagaactcaagttttaagaaatccttaagtaattgaaaaattcttctaaatagttaaaattaatgtgacgcatttatcactttatataaattatgaaaaagatatttttagctgctttagcaacaattggtttacaagcctgtactacaccttatcaagaaatgggggcttctggtggcgttgaagccactattattgatgataatgtctttcaagtacgcgcatctgtaaacggatatacccataaatcgatagcaaaccagtacgcattacgtaaagctgctgaagtatctaaatcgctagggtgtagttatttctcagctattaacaatacaagccagagttacaatcaaaatatttctaaagttgatgctggccttaagactaccccaaatggtgtctattatgtctcaagtgctggtacacaatataagttaattaaaccatccagaaacaatacctatgtttgctttaatgaaaagccaaacactgttttgcctggtttaatttacaacgttaagtatgttctgggttctccaatgcctacaggtaaattcaaagttccgaatagctggcgttaaagatatataccatgagggtgaataatagcgtctacagtctattatttaccctctttttatttatattagttatgatggaaaagtaatttcgaaaatcataaagaggttactttgtatgtgcgcgaactatgaacctataaataaagatcgagttcacctactagatctattcgaaccgacattcgactataagaatggtgtttatccgggttacgactgccctcttattttttaaatataaaagaaccaatacattttataaaacgaagcaagtctattttgcttcgttttatataaattaaaaatatatttatttacattggctcaacatatcaagtttgttatttactacctgagtttttacatccagcaaacttaacaaacttgggaataaattatcctgacttaacttttgtttagtttgttggcttaaacaattcacttgagcaagattatgttgtttccaactttcagagaaccacataatcattggtacatgtgtttgttggctcggtgcgattgcataaggtgaaccatgtaaatataaaccatgttctccggttgattcgccatgatcagataaataccataaacctgtctgatactttgatatttcttttagagtattaatcatttggcttaatacatggtctgtatatacaattgtattatcataactatttagcaattcagtttgcgaacagccctgtatcgcattagtatcacaagtcggtttaaaaggttgatatgcctcaggtgcacgcttgtaatatgcaggtccatgactacccacttgatgcagaacaatcaaacgcggacgatcatcatctttggcaatagtagccaaatactgctttaagctgtcaatgagaatgtcatcataacattcgccatctttacaccattttttctttaagttttctggaatctggtattgttcaacgcgatcacatgcacctttacaacccgagttattatcaatccaagtcacttggtaacccgcacgttttgcaatatctaataaaccttcgcggtgactagctaattgctcatcataatctacacgtggcatacccgagaacatacatggcacagaaacagctgtcgccgtaccgcatgagctcacttgcgaaaagttgaaaatatcttgtttagaaagctccggattcgtattttttgcatacccatttagagagaaactttcggcacgtgccgtttcacctacaacaagtatcattaacttagggaggttcttttgtacttgctgaacttgatgagcatcttgtccatatatcacaagaggcagatttttcttcggagccttcttatgatagtaagacataagcgatgaaatactattttgcggtgaaatcatcccttttaaatcacgatgctcacgaaatattgcagcgaaatcgacatagtaagtaaaaagtaaaacaccgaccactgcaaatgaagctaccagtgagaatactttcttcaataacaaccgtgatgctttttcttgtttaaatttaacttgagtaattaaaaaaatgggcaaaataacaaaaaaaactgtccataaaacaaagcgtaaagagattagatcggtaaattccgaaacatcggtctgcaccatattttgaatttggtcgggtgaaataatgacacccaatgtgtttacaaaataagagctaaagccaccaataaatatcaataaaattgcaaagattttggcagtccatttccaatttattaattgaaaaattaaattatatgccgctattaaaataactaatgtcgcccctaagaaaagaactgacttaataccattataaggtgtaagttgatggatttttttaaaaaaacctatattcagaaataaacctagccagatagataaaagcaaattaaaatttaatagtgtaacatccttgcatatttttttgaatttaaaaacattaagtgccatttttaaaaaccattaaatataaaaaatgctaagattagataccataccttaaagaaaaattaaaaaagaacctttgtaatattctttatttatatgacgatggctccttgagctaaaaaatcagttcattatttgaacacattttataaataaaaaattttaaactttataattgattattttaaaatcttaaaaccgattaattattcggctttaagactatatttttattactaaatttgaagacaggagataagaactaactttatatctttagcaacctaaatatgcatagttatccccagttgaaatgctcgccctggtagaggggcaatatattttagaggagagttttgtggtctagcctcttcgttcagcagatttgtaccatttaaaaatatatcaaatgaagcatttttaatctttaattttttatctatcttaaattcaagtaagttgtaaccagataaaggaacttcctgtattacattcttacctagatatcttggctcatcgtagtaaatacttgaaattttacctttccaagaatcatttctccactcaagaaacatgccataacgattagtaggcatatttggtaggtaaactccatcattagctaaccttatatctgtaggattaacagccttatttttaacaaaatcagctaaaccacctagtttaatattcccaatatgagctagattaaaatcataaattaaatcaatttcaaaccctttgacgtcagtgtctgtctgtttccagtattttaaaggtaatcgattttgcacagcaacacctgaatgagataaatacatataattttcaaaatccatttgatacccaacaagttgcatgacccaattattccaattcaaaaacatacctaactctaaacttttagatttttctggtttgagattctggtcgccttcttcttgtgccataacagaatagtgaacattacttgaatagagctcattcacttcaggtgctctttctgaaataccataatcaacttttaaatttataaaattattaaccttatattctcctccgataaaatattggtttaaattatattttctattttctattcttgaattactagcatttcttgctagtttaaaatcattatcttgaagctcatgttcaattctttcaaaacgatagcccgtatttaaagtaaattgtttgatatttaattcttcttgtaagaatatagctttactaatagtacttacattaggtaaatagcgctgagtaccacttccttcgatattcctatttttaaggctaaaaccaagtatcccatctaatcccttaaaggatgactgtttcattattaattcaattaattgattatcaattttatactcattagcttttgcagtaccaacatattctccagatttattagaaagctgttgaaaattcaaacttatctcttctgcagaggaaattggttggataaaattggaatttaatacaaaacgattttgatctattttcacaccaaccggtaatgtttcataagaatcagcaaaagattgattttgtaatgaaaatcctggtacaccatattcactttttttcttatctgcactcaatccaatgaaacctttatcaaaaaagtatgttgttccaaacccaatattctcattctgagcataactgttacctaattttttaaaataatttggtgtaacatccgtattgatcttttttattgtattttgcggagtattaggtatgtactctggattttttggatttatatatgtttttcctccccatatagatgtgggcttatctgtataaaaagaaaaatcgccatctgcccaatcaggattctcagtcataaatttatctatgtatggttgtgacgacttgttataaatatgttggactctactatctttttgacaggaagctgctaatgcactattgatcccacctgaatttgaaaaaatctggtcttcacataatttggctttactatttcctggaattttataagaagaaatttcatattctgaatatcttatatttgtagaccagtttttttgatcattgatgttaaaattgaacccctttacatcaaaatcattaaatcctttccgaaagacaatatctaatttgtttggcttttcttcaatttttttaggaattaaacccgattctatttgaacactcccgcctattgcatttccgccataacgaatattatctgtatttttgttcactatcactttttctataaaaattggatcgaatggtatattaatatttccactaaatgcattcattccattaataaattctccattttcaattactccaacccgatttccactcaaactacgtataactggtgcacctgcattgggtccaaatgaagtactttgtatacctgttatatttttaagagcatcacctattgtattggaactttctactttttctttgtccaccacataatttttttcctttaatgcatttgccttaaaaacaagaggctttaaaattgcaattctctcctcagcttgcacttgctgaattgctataaaaattaacggtaaagctgccaaaggtttcataatcccccccttttttaagaaaaggttatattataacataacattaaaaaaacaatccctatacatccaagcactttcatttattagtaaacagaaaatgatgattcaagttaaataagtagtttctttattcatttgatgctttttggattcttttaacagattgaaaagcttctcaactacaacagaagaaatttcattacacaatttaaggatagaagtatgtgcacaaccctaggatgaaagatagaggattatcaagctatacaataacaaacataagactactcgagctttgtagaagtatgtgaattgaagtttattaaatagccctgatcattcagggcttttttttataatgctctagcgcaaattgagacattgacattgctattgatcgtatgagctgtgcatcctgaaaatagaatgcacagcaatgtaattgttaaagctatctttgatcgtctgcaatgaaagactttcatataacaactcgattggcgatccaaccatagaaaaactgttcctggctaggattgcgttcacagatttcaatgtaacgttgcccttgcatgatattaagaacacgcaccaggactttttcgccgtcttttccacgcttggccagataagttttgagtgcattaagagttgctggaccataaattccgtcaactgttaaatctggccaacctgctttaccttggttattcagcaaatttaaagcacgctgtaagagtggttttgcaaatccggtaccgcaatttaccccagtatctaaaagctcttcagcaactaacgagctaattacattcacttgatcaaatcgcggatctgtccaatactgctttttataaatggctttggccacatcaagcggtaaatctttcatgttgcccttaaagccgttagtacgtgctactgcttcagtaataccgtactttgtttcaccgcctcgatctgctgggttgtttacgtacccgccctcacgcttaattaactcgtccagatattgttcaatgttcatttcggtttccttcagatgtaaaaaaccgcccgaaggcggcattagctgttttcaatgtcttttctggctttcttaaactctttgatcacttcaacgatcgttttaccttcctgtttatctataaaattaaaaatccaacggactaaagcccaaccgggtaaaccacaaacaaagaagaacccacctagagcaatcatcccccatacatcagtaacccattcatgaagtccccacttcacaataatgaatgagccgccagccaaacttgatacaaccgtacagatcaaaccaactgcccactcttgtggtgagcgtggcatacgagtcattaatacaactgctgcaaccaaaccgactgctaaagtcaccatgattgcaatcccatataattttaaaagtgctgtaaaaccgctagtggaaactggttccattaatttctccagaaaatttaggtaataaaaaagcacccgaattgggtgctcaaagttcttataaggtttaaagggtttgtaagattttccctccattaatcaattgagttgtcagtggtgcaactcccacaattgcaggtccacctggccccggctgaccttcagttgtgccatggtatttccagttccatgttccatcattagtagacttggtaccacgttcgccccagtttccgccatcacctgataatggggatccataacggtcattttgggttcggtagccttttccgggtaccgaagcttcggcatcagtaatttttaagacattgaagtaacttccaaaataccagcgccaatcttgtgagtcgcttgaaattggctggcctgtcatgacccgtccaaatggtgcaccagctccacccggaataccttgaacaccataagacaacccagtgtaaataccgcttggtgttgctccaccaccagatccacctcgagctagagtgccgccatcaataatcaggtttagtttgctgtgccggttcaataaaccgggtgctccctgaaacccatcacgtcgggttttagtaaagttgtaatccggatcggactcccatgcgccaaatgccaaatgaggtaaaccgccatcaccaccacgcccaacaacagcacctttaatagtcagatttaccaccagatcaggtgggaactcaccagtatcaatggcgggtagttcagtcgctgcaggggcaataaattcctgtttcggcggactggagttgtagtcgaatttatagacaaatctggtttccggtcgataagaactcgaactagaaactagtgcaccagattcaactacaaaactgatttcgccagtcgttggcaaatcccctctttgcatctgatataaacgcgccagattaatatccagctggtcatatcgaatgtaaattggagaatcatcaaccggcacgtcaataaagtctttatcgttgaggtaatagcgctcatcgtaattaattgctgtaatagtattagagaactggtcaaccggttctctttttgcaaccagataaggcaatgaacctttagtatcatcattaactactgtatagatggtatttacaaaatcatcaggacttagctttaaggccccgttcggcaaccgccctaaaaccaccttatttttggctgaacccggtgtaacaggaatcaggtccactgtgccatccgccatttgcagataaatcacatagctcttgcctgcaatgaaatctacatcatggcttaaggtgaggactaaaccttcttgctgtaccacctcaccgctttgatgaataccattgcgataatccgctacagcaatccggtcacgtaaaaccagtaattctgattctggtgccgcatcaaaggtaatggatttgcgctggaagcgcatcttgttccaaatccggtatgcattgaaatgcgcttgccacttgtttcgtacaccaacagatttcacctcttttgggtttttggctcctttatccggtaaatagatattgatacggctatcgtcggtcggatccgtgtattcatagatcagtccgtcgtagtcatccatcacgccaaaggtcaggtcatgcttgtaactatccggaatgatattcctgaagttaaacagcattaccgagttatcagttggccgttcaaaataaagcttgagcttattgttttgccgatatgcagtacaaaacaccgcatcacaaagattggtaaccagctcttcaaaagatagattcgtatcatcaatggtagtacagaactcagccgctagcggcgtaccaaaataatcaactacatcattataggtccgatagatgttttcaagatcaatctcatcgatcgaacggcggccaatcttgtcatcgagtgccatagataccaaagcatcagcaaagctagacgttggatatagctctgttgtcattgccccgtttttataagtcggcaacattcgctgaagatcaaaattgatcttgcgggacttaacagataaagctccagtggttgcataagtacgcgcacgaaaaaccgtttcatgttcatacactgtgctttgtaaaggataagcaccgtaaagcgcctgccactttacttcatcaacaactgttgtgactgtcggagtcggagttaaacggcgtgcacggacactacaacgcccctgaaacgtgaccatatcaagtgttgcaccaacggtctgacgtgactttgccgaacctttcaaaatgatctgcttcagcatcggattaccaatcgctgcaccagattcatttaccggtgttacttcaacttcaatcgtgacattaacagcggcctgatacccacctgaagaaacggtataaagtccattggtggccacaaaattacacagcacccggctacgttcaacattgtccagaatgaatggaccaatccatttttcacctattgaactgatctttggtgacaaagctgcagtttgttggttatttaactctttaagctttaaccagttagcattaacggccgccggatttgataacgtcatacggtcatcagctaccgatagaacgctataagtaccatttaaatcaaaagtctggccattaaacgtgaatgaggcattggtgatttctacgcggtcattacttacaaacttagtggttaaatctgtgttgtttgccgttgcccgaagaatctcgtttggatatgcaaaatgaaggtagttcgtaccttctaaagattgtgtatcagcaggacgtaaaacttggccattaacagaagtttgatgctgaaccgttagtggcggcgtggtaatttcggtaccaagcgagaaatatggctcacctgaaacaatatctacacctggtcgaaagacttctaccgatgcgccagcaatatcgacaatattggtttcaccgtcataagctccattgattttatagtgtccacgcccaatacagcccactacatgctcaacttcaacgttgttttcatataccttgtaaggtactgcgattaggtcgggagtattccacccagctccatagttatcagcaatacgaccattcacccggatcttgttttcccggttagaaagttcattgtttgctgaagaagactggttagtattttgagtcgtttgtgctattgatggcgttggcattaaaaatgcgatcgcaatactaatcacaatcgaaacaatagccgcgacccatttagggttctcaactacgataaaagtgcccggtaagaaatcaagctgctttaagtcatatgcattctttggtgtgacttcattcgcaaatgaaatttcggcatgatccatattgcttgtagtatgaaagatacggacatgctcaggcatatgttcatattttgaagtgagccattgcccaatggtttgagcctgctcaattgtcttttcttcagacaaagcgtcttttttataaataactttaatcataataactgacccgattaaaccccatttccatcacaacctcttcaggcaaataagtgactccgctttccatgaggtgaagaatcttttgcccacgaaaaagccccacatgcgggggcttatttctttgtctcggatggaaggcgactatgcagccttccttgggcatgggtagcggatttaaaagttttaaccgtgaagataaaaaagtaattttgcccttaggctgcataaagagttcaagcgcttcagcccgatctatgccatataggtccattgcagcttcatgaacaaagtgaacacagttgtagtgatcctcgtcatattgcctatcgagcaaatgatcatgacttttcatatagcccccttcaaaccactaaagcgatccagtgcaaaaatgtccccagttttagtggtatttaatcgtggtgattcagccttgaatgtcacagctttatggttcatggcgacacttgagagttgcagtccaagtaaataaaacattggagagttcagattgtctgaactgtaaatccggtaatttacggttggctttacatctggatattgcccttcgattacccgttcaaactcatcaggcatcacatcacctagaccagagatagaaacggttaatgtctggtccagatcaccaagcattccggatctttgtatagagactggcaagaactcataatagacctgaccggatccttccttatgttgtacatagacacctcggtcatcattacggactacccgataagtattcataaaagaaggatgtgatagctcaatacactccagttgatagacatcaactttccgattgaaaaagaacttggcatattcgttatccattagacctcccaatctttaattaatgctatatcggcattcaggttaggctggttttgaacaacttcgagctgcgcgttcacacgatataagttgccgttgacttcattggtcttgaacgagtttggaatgaaattgcatagatattgctgacgtgttccctgatcaatcaccaaatccgcataaaatgaggctggtttgttctggtagacccgccagaaagccatcattttattgaaatcggttttacttaagttccagttcacatcaacaatgtggctgttacgtttcacatcgatgtaatagcgaccacgaccgccatccatctgctgacgtttcacatcatcacccggtgttacgccatagccgctggtctgaggatttagctttaacttgtacataactttccttcaggtaataaaaaaccaccccgaaaggtggtttgatgaaataaggtttagatatttaaattaattacaaaaacgatttaacattaagaaatcgatttaataatagtttctttaccatcttcaaaaatctcttttactacaaacttgcagtaggcttcatcttgagatggttcagtcagtaaagctggattcacaaaatctttgatctgttttaaacggatcaattcataatttccatttctttccaactgatagtccatttttacatcacaactatacatagtagttgacccaataacagaagtaagcctgaaagttaacttcttatttgcgggtactttaaactcaaaaaactcttcaccattatttaaactgattgtgggtttaggcatatttaattttttgggctcatgcatagagccatactttgttaaattatttgaaatctgcttagttattaggttttttgaaattttttcaccctcattattttgataagtaatatagaactgcaccatgggaatattacttctataaacccttaaatttgcagtatttcccgaaacatcatcctgatacatatttgtggatcttacgagattatttaccgcaggaatggcacatcccgtaaggcctaaaagtgttgtagaaattacaattatttttttcatgtcttaaccatcaattttaatgccaacagactctatcaccttgaaatttaaatattatgaaaatgaaccctccgaaaagggttcaaattattaagtacgatttcttctcgctgtcgtattctcagtcaaagaccgactaatggttgagtttggatttgcgatttgatcacttacaagcttaggtaccgttcttggaagctgcttatccagttcatctttaacaatgatccggactgtttgctcgtccagttgttcggcttcaactgtcgccccactcacctgattaatcacttcaattttgaaattgattgtcggtgaagctggctcaattgaaggcatcatctcagcttgagggcgtgaagtacttcctaaagtaaagtcctgaacatcatccagatttgaacgatcctgaactaaaccattggatgagaagtagaccttgccatcatggaataagtctaaatttccagaagaagctaatttaggtgtgtctctattacccttatagataatctgagtatcttgaaccggttgattaaagatgtcagcctgcttttggctttctataaaggcactagagctcatcattgcacggcgcatgacactatctgccaaggcattgttattgagaaaagcttcagggtttgcactcttacgcattttctcgactaagccaacaccgccccagcgtttaatatcttcttgggaccagaccacctctcctttatggacaataccagcaggctgatatttcccacctgatccagtgtaaccaccgtcagcaaagccttgatctttaattgcccggatgtttgcaatgatgcttgcaccttgtgcaatagcacttgcaattaatgggatatttgctggaaaaccaacactagccgcctttgcaatactttgctgaatagaaatacctgcagctgcaatggcataagctttatcagcagcaaacatgatcttgtatgcttttgattgctcgccaaacattgaaccaaacatcgatgtgagtgaacccatcatttggccaccaagagcaatttgagcattcaatcgatcttggtgatacttatcttcaatatcctgagcattctgagcatattcggcagcgatctgattgcgttggtcctgagcagcttgaatgatagctgttttccggttttcgaagtcctgttgcttgatgagtcctgcttccatgtgtgcatttagaacatctaaaccatttttttcatcaagatcagtagcagcaaattgactatctgctaaatcatttgcagcatttaaacggctaaatcgttcctgatcctgtctgaaaaattctccggtaccattcatatccgcttggataccaccccagttttgaacagcattattcactttatcgcgtgtctctttatcctgattggctttagataatgcgattagcttttgccgctcttctatagaaagcttggtattcttaagaatttcctcccgttcgagtctgtaacgttcctgcatggcttgcgtttcagaaagcagagataaacgggcttgaaacaaccgctgttcctgagctagttttaataaccctaactcttgctgtttttgctgttccagcaattcaacagcttgcttctgctcaaacttacttaattcaaggtcatgagctgcattgaactttttacggttaaaggactcttctagtaactgttcctcggttttctggaactccttatagtcttccaatttcgttctaagggcttgtttggctatagcaatatcattatctgcacgacgatttatttccgcctttatttctgcagtacgttccgggctaaagtttgctttatcaacatcctccagtcttgcctttctattattgttaatccgtccgacttcactagccacctcattttcaagtgaccgttgcaaatcctgttgacgttcaagttgagattgaatatcaccagctgctttatcacttcctttacttgcaccacctttcaccttgctctgcatcttgggagattgatgtagaagcttaagagacactccatcctcaaagatcacttcactgacataaccacctcccttgctgtcataccatgtcttgatatctttcacagcaacattggtcgtgattggtgttccttcaggcattgaaaaatcaatacctttatgaaatgaagaagcccctttagttggggcttttcgtggaccataattagaactgatcttgtaggaagttaaaggttttcctcccgcctgtaatcgagccagatgttcattagaaactttctgacctgacaatgagccaccatatcggacgtcaagatgtggaccagtaccaataccggattgaccggaaataccgaccaagcgtttagtaagttttgcttgtttttcaatttcctgcgtctgctttcttttagcttcagttaatttatcttctcgctcctgttgttcttcgatgatcttgagatttctaagtgcgctatcaatttcatctttagacaaaattgcactcattcctttagctttttgcagttctaaaatggcattagcttgagcaacagtgtaacctttatcaagccaacctgatttatagattgaatcaataacgctatctttttgcttggcttgataatcttgcaaagccttagttgccttttctgcttcagtagcagtatttcctaaagcatccgcttgtttttgatgctgaattgccgcattttgtgcttcattacctccaagtttcacttcaactcttaataatttaagtttctcagctgataaacttgctttagatgcattgtcatcatactgcgcagcctgttttttcagattttcatatagatctgtaggcaacttaattttatttagacgttcaatggcttctgtatagctgatagttccagttctcgcttcttgggaaattttttcaacctccctatttcctcgtgcatagttctcgatatcaattaatgcagaccctacagcacgcgatgatttctctaatgctttattttgtgcattaaaagcagtagttaaatcattaactgctttagccttatcattgccagttaatttttttaactcctcatcagctttctcagcaactttagcttgttcagcaagcttttgctttgcctcctctgccttattattaaaataagaataggctgccgctaatcccattactcctaatgttgcaactccagcccacccaccaattaatccaaacgcccctttagctagtctccctgcaattgaagttgcagtatttagcttaatttgagctgctgtttgtgcatttgtagcagcagttactgctgcctgtgcttgtgcgtatcgagttgctgccgctgttgcgccaaatttagcttgggtttctgcatttgttgctcgcacattcgcgagatgagcttttgctgcattcaaagcagcggtagcttctgcatattctgcttgagcatttaatacagatgcttggcggctcgctaaagttgaagccattccctctttaatagcagcgctcttcatcaaaattgcacgagtgatatatccaataccaactactaaagccccatcagcaattaaatctaaattacttgcaagagtttgaactgatccagctaatacctgtgccgcaccacttcccttacctgcttcgccaacaaattttgtgatctcgttgtttaggagtgtgagagactgcccgattgtgatatctgttttagcaaaaagagcatcaacatcagattctacatttctaagcgcttttacaatttcttgtgaagtaatttttccttcagctgctactgaacgtaattcacctacagtaatacccatacctttagcaatagcctttgctagtgctggggtttgctccattacagaattaagttcttctccacgcaacgttccactagccaaggcctgcccgaactgaactaaagctgcatcagcagcttctgcgcttgcaccactaattgctacagctttagaaactgtttcagttaaacgtgctgtgtcatccattgtgaggtttaaagttttggcattatcactaaaacgctggtaaacctgtaacacagaatcccaagctgaataggttttttgagcaattcggaaagtgtcttccgttgctttatttagttcaacttgattgttagtgactaacttaaggcgattttgtaatccagtatatgtatccatctttgaaatggctgaacctactgttaataaaccagccatgtgtccagctaaagctctggtggctacagacaagctgtccatagacttagatgcaaattcacctttacgttcaatgctaacaagttcattgcctagattacgcgcattacgttcagcattttgcgaatcaataacaatgaccaaacgggattcttgtgccattttactttcctctaggcaataaaaaacccactcaatgagtgggtagttctttttaagttaaatataattaccaagcagggtagttaaaccaattttaaaaagcatcctagggtgcttatgcaagatattatttattctcatggtaacgaagaatactagctactttttgaaataagtagcctgcaaggaatccattaaatataattccgattcctgttgctatcataactccagaccaaaccgtttctttaccatagtaagaagctacttcaattcgaccaaatgcaagaataaataaaaaacctgcgataaagccaagagctattaacacccacccgatagcattacaaacttcactttctctcattggtttatattgtggtgcactcatcttaatctaccttgttaaagttcttcaaaactttgtaagtaatatcttgattagtggcatcaattacttccaataaagcacctttataacctatttgcttagattggcttaaatcatattcaacatcattattgaatgcaggacgtgcttgattacttgagaattcacggtacccgacattaattttatttccaaattttccactataaattaatgtttgttggaaggaattatctgatgcaattgctactgtcttcatagtagcttgatgtttatcagtacagttttttgcattaaatactgttactacacagagcttaccttcagtatctaacataactactttaaatgggtcagctaaagggtttttctgaaccatccccccaccactgacagtgttgaatggctgaaaatattgccctttttcatttttgcctgtttttaagtaaatgcctgaagtaagtgaataagcaaaactaattttaatattttcagggacgtttagaacttcacgatcaaccaccattccctgttcaagcatttgatcccctacaaatgctttattaactgatccaattggcggtttgcttatatttttaggtatagcttgataattataggctggagtagcgcaccccaccaacccaagaccaattaaacccgcagccaatatttttttcatgaatttcaccgtttgttataaagtgtactaactttaacaaactggttactaaatgtcacataaaggaaaaccacccgaaggtggtttctatcaaataaaactaactaagctatttcacaattggtttgatgccatgaatggttatttccatatgaaaaactaatttcacttggtactaaagttcgttcctgatgatttaatgactcaatcatacttcttagtttgccatcaccttgaacatgctctttatataatgcacgaagtaatagctcagtaggtttaccaattaaaccgcgatcagcttcccaatgtctaatactagtctcactgactcctaaaagcccagcaagattcttctgtgacaagtttagttctttacgtaaaaaacgaatttcctcaccattcaagtcaggcttttgcgtaattaagaacaacccaatggcattatgaagctcatgaacagattcaatagatacgagttcaccatagtcttcatcattttcaattgtaaatccattgcgcagccaaatattgctcagaccgcattcttcatagtgatacataatttagcctactctctaaatgtagtgactactactgagaattcaccgttctcgctctgcttgattgcaacagctgttgttatgtattcgcctgcagtgcgaacagaaacatttaactggcaatcaccacgagtatttgggtacggcccctcagtaatatctccatgctcaaaacagcaaataatttgcttcatagagatacagcgttctttcattctttcttttgcatgtgcagttaacttgattttgctagtatctctagcaaatgctctaagtttttgtttagcttcagttaatgttaaacacatacaagcaaacaccaaggttcttggaaagagtaaaagaatgctgaaccgtcaaatattgacggtaaggtgattattcatcatttgataatcacgcgcaacaccttaaaggtaattttctgtcaatccagatcaagtattttgtaacatcgactgcgttattttgagtcgcgtttaagagcaactgcttaattgtttgacgttttgaccaaattaggcttttcagtccctggcaatacctaatttggtcacttacctttgcttttggttgatatcttcttatggcactcctccaaaaacaaattatccaacgcaaaaatacagtcattaaaaatatgagcagccactggcaaatcattatgctcagcatagacattgatagcctgctgatctaaagataacggtatgctttgctcataacgtctggatcgacatatagtgctaaatgccgaaagaattgaatcagccgcatacgaatattctggcggatccggaatacggccgcctaagaacttgatttgctcgatttcgtgcggcgttttcgacgcatacgttttttggtatttgtagagctccatgactttcccagaattaaagccttgtccttgtctgcgtcttcctgaatcttctgggcctgttctttaatgaatagccagattgaaataccaatatcaccaagattaagaagctttgaggcattctcaggtgtatatggcttttcggactcaacagttttaccgtctacgatttcggcaaataccacacctttccagtcttcgattaagtgggccgcgcatgcatccattaaaagctcgtggtaaagcttggcatcttcatctttgaccatcacatcatagcctttagacgagatctggtttcctgcccgttcaatagctacctgaaaaggcttataagcgataccacggactttgaactcagcctgtacatcgccatcagcacccttgtattcacaccattttgatacgtctgagcttttaataattccgacttttaaagccataacaacctctaatttttagaaataaaaaagcccatgggtttccataggctttgttactgaataagttgattacacaagagcacgtacaatcgttggactggtacgcacttgggcaaaattgatatctattgtaataatgtcatcgccaccaccatcagggtgatttgcttccttaacttcaagttgcgggaagttaaacgagtacttactgcctttggtatctgtaatatcgaaggtcaatgtaaatacatcacgggttttaatagcatcaatccaagaagcagatgttgctgaaaacatgaaattagcatttacgccaatatccatcattttctctaagtaaaactcaggcgtgtacttaccagaaccgatacaacggatcgcttccagattattactaaagttgatggtaagtgtctgcagacaagctttaccctgaattgattgaccattaataagtagcttttcaacatttggcatactcaccagagggcgagtcgatgctggaataggatttgtaacaggattaacctgctgtcgcgtaaatgagctacctactaaaccaaagttaccagtgattttgcctgtggtctggatcgtcatttcacctgtattcacttgaataccacgataaataaagacttgaccaatatcttcaaagacttttaccaaggtaagagacttacgtactccaccaccaaaacttaaagcatttgcagcccagttattgaaagcgagaacatttaagaataagtcaaaggtacctagtgataattcaaactctagttgaccagttacttcggcttccgttacaacagcgccttggcgaaaacgtgaatcaactacttcactgctatcttcagtagtaacattttcagtcaaactatcagtaacacggcgaacggtgtaccagactggatttgcaggagttgttcctaaaactgcttcctcacaagcatataatcgaatttttgcgcctgaactcatttatggttctccaaaatttaggcaataaaaaacccgctgtttaagcgggttattaaagtgtttcgtctgtttctgagatttctggcggttccacgccattcatggctgcagcaactgcctgagataagttagtcggctggaaatccactggtgtttcactcaacggctcttcaggctctggttcaggttcttcatgcagacggatatcaatccagcggccttctggaatatcaagtggattttcgagatcagctacaatggctgccttttccacatcaaacttacgtttataagttttaatagaaagatcaccattttctaaggttgaatattcaactgctactaccgtattaccgttggcatccttaggtacttcgatataccaaccttcctgtgcaaagcctaaagagcccttaatcagatagtcaccagtgcctaatttgtcaaaagtgatcggttgcttggcagcatcgttatttagctcaatatgactttggaaaagcttaacgactggtgaagcggctttaataaaaccatttccatcagttgtagtattttgtgcagtcaataaattaaaccaattagaccaagtaccactattattaaatcgatacttcagggcagaatatgaggcagctttcccaagctgaaatgaatgacttccatttgtatataaacccattgagcgtcgggtacagtgtaaaaagaaaccataaggaccaatactattaccagtatcatttgttaaagtgtcatctgttcgaaaaaaaccattattaagaggagcaaccatatcagatacacgagaaccttcagcccctatcccccaatcaccgactcttagtgctcgtcccggcgtaggatcatattgacttgttgttgacgctagtacagcagcagttcctaaccccaaattcattctagctgtctgtgcattatcagctcctaatcctccctgagaaattgataaaggggttgtaagtcccttaagctcactaatatcactatttaccccacttgcagctgcgcctaggttagctcgtgcaccagccgctgtagttgcccccgttccaccttgagagatagctgcagtaccaactacttgagaaaagttgggtgccagattgggaatacctgacgcaaatggcaacataaactgccgcttgccctgtgaggcgttatatgggaatggccgatgatcccaactaaatttaaaaacaagatttgccattatgctgttactccgtcaatcacttggaaagtcaaagtttcagtgtgctgtgtagtgccactaactacagctttaatatccatctgacacagccctaaaggccaagttgcagtgcttgcactagatttaatgttcagccaccctttctgtgtgctttggcttaatgcagtacaagttaatgtggccacagtagcaccatcagccagagctttaacctgtgaagtgaaggtataacctgtaagatcaattgcacggcgcacatcatctggtggatattgcagggcttcatccatatcaactagctgaagatttaagttgaaagtgtcaccacgcttaaatacaaaattgctcataagtgattcctatagacataaaaaaaccaccgatgaggtggtagtgattaagacataaagtacctctcaaaatggaggtctcataattcaaattaattaatatctaggtttatatctcttgtttcctccactcgtaatacagtagtgcccacctctaggacccacgcaataatccaccacagcacatgaacaatcactatcgtagtaggtttttttctgttttctttcagaatgatgaggatgagattttaaggcctgataattatttgacgtggttgatcgagacttttgtttaaaacagccatccgtttcacataatagctttgttgataaccactgaggtgatgaggaatttaaggaaatacgtgcccagtttcctttcatctcataaatatcaactttttccccacgtcctaactttcctactacttgaccgtttggtttatctctaatatttaaagaattagtgttgatatattttgattcgataacttcctctactgcactctgcgcattttctgagtctgaagtttgttttggagagttatcattgcctgaaccaaaaatccctaaagctactaatcctgcggcaccccagcctaaagttgattttttcatgttttaccatttgttataaatttccattactgtaacagaatgtaatcacaaatgataatatgctgaggtcattaaaaataatcgccttgcagtagctttttcttgaactcaaagctcattatctaaatcgacacttactccagtaacaacgttatgtttaggccctccgagactaacaacattagccaagcgtatattcacatcagaaacacatagcttgttttcagattgccatttgctcaactcaacagacataacatcttcaagatgccgttccagttcttgccgtttaatttcgatttcttctaaagtcagcatacatgacatatcaattcaccttgtacccaatgctcacattatactgaatgaaatcagcatctttacccgcataaatagattggccattcaaacattctaagtgttcgattgtgaaatattcaaaatgagcaagtaatgcatcactcaattttgtgatttcaattattcctgaattgggacgtgcaaagcattgaatcatgatattaccggtacggcgagtacatggcttatctgcaatgccagaattaaaactgggaccacctgcaatcgttaagcggcaccaaacaccatctttaggtacattaaagcctggagcatttggatactgtattctgtcctgcgcaataccagtaaagctttgcatacgatcaataatagcttgccttgtttgctctaaagtcattgccatcttaaccaccgtacttttgagaaataaagttaaacgtgaggccataaataccttgtggtgcttgatcagaccagccgttttctaagcggggtgcataagctttattgttctggatataaaccaaattgcccaatttaatctttacagcttgaattgctgcatcttgaattgggtttgtttcaggttcacgcacgccgaaatcagcagatccaatcgaaacaatatgtgaagcacggtatgctccagtatcaacaggacttaaattaactaaggattgcacggtatccatgacaatattctttacatgtgcttctgctgctttagacacatcaagactaaaactagtcggctttttccccttccaccccatgacttttaacctcgctttcctcatacatcttaaagagatcctgagcgatcgcctgaattgaataagcttcaaactcagagctcggttctcgttcacccatgagctttttaatcttttgccagacatgaacagcttcatgtaaaagcaatccatacacttcaatctgatttctttctgaagtatcaccaagctgaacaactgcatatgcaccttcggaatagaaatcaacctgagctgcagccccttcaatagacaagaattgatcgaccttattcatgtcctcaaatagcaaatccatatgcagttgatttcgaactaatgtgtaatgcacatgctgaaatggtgagataagccacaaaggaacgtagtttgtatttaccattcaaactcctaaattgcgcccattaaaaaacccaccgaagtgggttttaatttatgcaactgagcacttttctaattttaaagaccagtcttctccaaatcttcgattaagatagttagtaatttcttcttcgtattttggaaatgttgcctcagttactactacagcatttcgaccacctgtaactccatatcggtcaaagccattttcagcatctctagaagttgtattatttgaaagataaacttttgccttaccatctttaattagactagctttgcctcttacatttgggcatttcttttctgggatttcaatgacgattacatatgcttgagttgccataatttaattacaccttctcaattatgaaatcaacgccagttgtcattccaccactaaaactatgggcagttaacttagcagactcttcatcatctatttgaccaaattctacagctttttcttttgaatctgttgtagtaagcaatccctcattgtctggaattaaatatttaccagaatcggttaacttaacgatataccccataatttccccaagaaagtattttaaaaataggtatatagcttaaatcaactaaattaatcaatacaagcttataccttcctcaactgacatttccaaatagtagaagctggatcctgttgaatatgaattacccggaatgagcctaaggctgttaaccactcatcatcaatctttggctctttggtaacttcattctgcagcactgtagcctttttatctgtggccagtactccaagcgtctgaatctcatattgactgtatgagccaaacagaacgccacgaccagaatagttttctttaacttcgacataagtttcagttttaggatcccaatcttttcttgagatccggtcacaagtaaatgaatgaacggcgtccgctaaatcatcattaaatgcttcagcaatatctgcctgaatttcttcacgtaagcccatttaaattttcctgacaaaaaatacagcttttcgtttgctgtaaggcttaatcaaatcaagaatgaattgttcgattgcactaagctttactgatccgtcctgatattccttttcggtctcaaccgtatcagctttgaccttcttacgttttagtgcctgttcctgcccttgatatagatcacctttcataatgcccttgatgatttgataggaggccgtttttaaaggttcaggtacttgggtagcatcttcataaggcttaacgttacgtgctaatagatatgcttcggccatttggaggtattgagccttatcactggcagataaagcatcaaagccttcaacatgttctatcgcttcttgttcagtgataaagctcatgaattattcctttggaattaatgctaaaagttcatcttttttagcacctgcttcaaatgcaatgcctttttcagttagtacagctcgaagctcatctacttttagaccagcatagttaattggttgtggttgagtatcacttggtttttggtcatcttcaggtgtttgaccaccttcacctgattcaagttcagcaatacgtgctttcattgcttcggtatcattttgaaaggcaataaattcgccctttactgttgccagttgttcttcgagttcagcaatttttgtttctgtcatttgttgtctttcccgtgcacggttaaatgatgaaagtcccatatgtggatctccaaaaagataaggcggtgttacccgcctttttgttatttgatcttgtgcttgaatgccacaatacggatctgtttaggatcgtagacacgttcccagtttgcggctgttgctagaccagcattattaggtgcaatacctgtatcacctgcccacttaatgccacgaggatgcaatacaaagtgacggcggttaataagaatatctgtacctgctaggctgtctcggtcagtctctacaccaactggtgcaccaatatcttggaaaccaatcgcaccttggccaaacaagaaagaggtaaatacatcaccatccactggcataccgtcatcgacaatcacacggcgatccataaaagttttgtaaagcaccacaccatcagcatcacgcacagtttcaattaaaccttgcttggctagtgctgccattgtgaatgagtgcattgaaatcgctgttaatttatcaacagcatctcccaatttataagatgcatcgataaatgaatgaccatcaattacggctgctgctccagtaccagccgaaatgtcatgggtattacctgccatgcttgcagacccaaatacacctttaagtgtatttacggtaaacccctgaaattcacgagcccagtaatctgctacaagatcagcaatcgcacccaatgggtcatcaccagataatgctttagataaatcatttgcaccccaagccttaccacgggcatgcaaaatagcaatatctttaccagccgtgatgttatttaccccaagagctttaccatctgaaagtacttcggactcaccgcttaaatcattccagaaaggaatatttactgtggtaccgccttctgtaccaaaagcgactttttcatcaagctccccaacaatgcctgactgccataatgcagacttctcggcagtcttatttaatacgtacggagtaaataactcaggtacgattacatcagcaatttttgtctcagccattaggctttactccttaaagtttaataccgtgttttgccgctagctctttagctagttgcgggttttcatttcgtaattgcgccaatttggtcatatttaccgagccatctgctttgagaatgtctggctgaccttttgaattgttgctaccaggtgcgcccatgccattaggtttaggccagtaatacggtttttgctcgcgtagagattcaacccattcttttggggtcatcggtgtttggccgtctttaccaatgactacttccccgttttcatcaactgccacagctttgccgttttcatctaatgcaaactttgactgagctaaaaaggcgatatcaggggtcgcttctggcaatgcttcaagttcaattgcagcctgcacaatttggctttgaattactgattgcttgaacttttgagcataagcttcggctttatcggcacgttctttttcggccttcagtaacttttcatgctcttcacgcatcttctcggtgcgcttctgaatcacttcgttaaccttgccttctgcgattaatttggcctcttcatcctggtcaatttgagcaaagactttcttaacaatttcaggatcaattccttcaaattgtttctgaagtttttgaagttccaactttgcattcttagcagcatctcgctcgctttgaagtgcagatttcaaaccttttggatcttcataaccttctaagtcgaggcgaaacttcccgttttcctcgacatataaagctcggtgttcttctttgattgcatcaagtgaatcaacaataaatggcaatgacatgttcaaacctctcgtttgattgggtaaagacttatctcaaggcattaaaaaagcgcccctaaggacgctaaatttcgattgaaaacttagtaatttgttgcaaataaacggtagccttctagctcccaaagtttattttcagctgacttttctgcatttccacgagccatacgctcaccaatttcagcatcaaagttttcagcattcacacatgcactaaaacccgttgctaggaaaaactttccatctaaaaatgcatggacaaaagtagatgtcgtgccaccggggcgttgctcaaccgtatatgtaacacgctccatcaatgaatcaatttgcgctttagttactcggggtgccacagacttttcagctaactcttgctctgttacttctttgatcattttcttctcacaaaaaaagcacccgaaggtgctaaggttaaaaattaagttctaattgatgagtgcaatcgcttttaatctttcaaaagtaaaaccataaattgccatggctcttgaaatcttaatttgaagaaatggcaccagaattaattttgtgctcagaatatattgagcatccgacatattgatttgcttttcagacatttgtagtacctttcgctacatttgctttgtttgagtcggccttggttcatcagtcagtaagcgaacaccatgagcaccatatgcttcaaaagttacagtaattgttgcaggtccatttaaggcatcagaattcatctgtactgctctttgtccagctagtggttgtccagtttcttcatcacaaataaccagataacctttcaaagtagggtgacgctttagcactaaatgtcttgactcactcataagcccaactccttaaaggtttgctcatccaactttcgaagttggtccaatgtatataaccgcccctctggatcgaagaacttatcaaaatcaaattttccttccttatagagcttgtaacgtttcggccccaaccattctctttgaaagaaatcatctgtcttcttgaagaactctctaaacgtagtattggcatctagctgccctattaactggctacgctcttctttcgggatgtctttaactcgacgttcgtccataacaaatggccgttcaccaactaatttcccgtctttctctacaggtaccagaatacttcggcaattaggatgcaacggcggtacgcgctttgccggatcgttaatctcccatacggaaccatcaagagttgcgcaaagttttgaagttcttccgtctaaagttgctaccagtcttacgtattcaaagccaatctggttaaagctattgagataagcttgattggctacatgactacgaactgttctcaccgtacggtcgatatcagtcttactgctacttagaagcccatcctcataattaagccgcttggtgccgcgaatgcgctgaactatttcctgatttgttttacctgagttgataccatcccgaatggcatactcaactttttggcgtgcagtttcagcaatcttagaaagcagctcatcaaccagtgctcctcccaccaacggtacttttttagctgctgcataaagcttttcaccatttggctttttgatcttgccgccatatagcttcgccgtataattggcttcatatactgccaaggcagtagcagaaactgcgaaagcttcaggtaatgcagtatttagtcctataaaccactgagcaatcagatcacgaatttctttaagattagttgtagtgtactgtccacttgctagagccatcttttcagaatcatttaattcatcaagcaaatcccgaagctttgccaacattaatattgactcatcattaaagatttttagtagctcattaacagattgagaagacacccgatataagtacgcctgatgttgggtaagtacttcaatcaatgatttatcttcttttgaagccatacgtcacctctacaacggcatactgtcccgttcaccttcaacccgcttcacttcttcctgatagtcgtgagctggtaatttacctgtcatcaggtattcccaatatgtgcggaaagagttctttccggcaatagcaccttcataaagttgtttggccagattgatatcgtattgctgaacgataaattcaggttcaaccgtaaatgcatattttgttgaatccagctttaaccactgagctgcatatttgatagcttgttcaatagctgcagcagcacaagtgacaatgctatgtaggcttgcttgttggtcatcctgacgcgcacgtcgtgcttcacctgattcttgtgagttggtatcaatcacctttgctccagcttctaatgccgaattcttttgagcatccatttcctttttagtgagttcaatgccactacctgaaatttcgagataaccacactgagattcactaggaaggctccagacagccatcacaccagtaacgctaatatcttcatcaccctcaagtccattaatccaaggctgcggatgagctgtatggtgaagtgactggtaataatccgcacttagctggtaatacttgagtgctgccttggccatggtaagcaatggtaccgttccaacttgtggagaattatcggtcgttccacagaaaacaaacggcgtgaaagatagctgattaccgccgagatctggcgttttatcttcttcaacagagccatcaaataaccgtacagttagcgcaccatcaaccatagataaaacacggtgaaccgtctttgtatcatgcccaaactcatcttcactattttcgaattgttcctcgagcactaacagctttagatccttacggccaccaatgctgttttccttccagttaatgattgatagcgcatcatatagagcgaaatatggcacaccagccccatcaacatcgacaagcaaaccacagcgcccaaactctagcaactctgaacaaatgcgaataaagagctgtttaagcccaaaaccatcattggttgcattctctatcaaaccctttaacagagaactttcaattacgatgttaggttccagctttgaaactaaaccaatcatcgtgcgtaatgcgtcctgaacccatagcggatactgagctcgacttagataggccttataaatctctccagtcgtatcaccttgcttttcagcctcaatcattccggccgatttagctaggtactttgtttgtgcctgtttgatctgctcttcaccagcaacggcgtcccgcataatctcccagcttttttgtgcagcaatatactgcggatgtttatcagtaactgccataaaaacaccaataaaaaagcacctgagaaggtgcattgattaacgagaaaaaccagcgattgcgcgccgtttaaatattttctgaatgatgactgggaatctcttagctattggatatccaccagcgtccccaacgtggtccaaaccagcgcttttatctggcattccaaaatcatcatagacttgctgttctaaagtagccgtaaagttaggacacttgtttgtgttcactttaagtgtcgttcaccctcagcattcagaatttgtgcattaactgcagtgatacgatctttaataccgggattcacaccattaacttcaactttgaatccatttttctttaagattgcatgatcagattcactgaagttctttgatgatgttgcctgacctgaagcatctggaatcacagtaatatcgtgatctggaaagcgctcattaatcagttgacacatcgtcggtgtatctctcacgccaaccagttcatctaaagctcttggcttcccttctctaatgacataaaccacagcagccattttaagcacgttaaaatccataccaatgagtaaaggctcacctttcttaatttcttcatccgtgtggtttagaactcgatcaaagtcggggtaaacagcaccactggttaaattgacaaactgccctcttaaataagctgaaattaattgcggcggataagactcataaagtgatgatatgtagtcatctggaagattagcttcattgtcataagttgaagcttgaatcattccatagagcttacgcttagcctctgatttatttgcctctttaacaaattgctcgtatgtaaacttaaaaccttctggtgttgtggccacatcaataccgttgagcaaaccagcttgcttataacgcatacgagcgatgatcttacgccaagcctgttgagctttgaccttggccataacatcaagctcatcaatcaaggcgtggccaattttaaaacctacaatggttgctggtttctccatagaccggcaaatgattgtagttcgatattgccgaccataatagatatccacctctttattggtttcataaaccttagttttaagcccccaatcgaaagcaacctcttcaatagttggaaagaaaatgtcgcgaatctgcgggtaagttggagcaaaataacccaaaggtacttttgggaattcccaagctttgttgcataaactggagcatccaacccaagtctttcccgatccaaagccagcgacaaatgcgcggaacttcttttccatctgcaaaaaattagcctgaggtacattcagtgtcggattgatgttcggcatcttttttactcgcatctacaacttgaatagttaccttgactggtgttggatcttcatcaccttcaccctctcttaacttttcaatctcaagttgctttaactcaagatttaaaagcatgaggtcataaccctgcatttcttccctaacctgtttaataaccccttgcttcataagcctgttgttcttccagtcttcatagatcttctgaagttctttaagccgataggctttattagctaaagggatgtcataaacattctttttaaagtcctctcgggttttatgaaaaaggtctttatatttcttacttaaattctttcctgccgcttttgtcgggtcataaagttgtacctgttttcgatcaatctcaatgttaaattcttgcttgacagcattagctacctgttgaggggtatccatgcaggcaagcgcttgaacaataaatatttttacctgttctttaagtgcagccatacccccacctttgtctagctacgtctagcaaagaaggcaaaaaaaagagccattcggctcagttgattacgcagtttccgcagcattttgaaatatcaagtttcgaaacaaacggcggattctttgcagcttcaacgatacgtttaacgctttgactcgccccccaccgtttggttacaccaacaaactcttcgacatcgtgaccagctaaataatgtttaggtaaacctgttgagctactaaagatcatttcaccgtcttcatcacgttctacgcctatatggtagagttcatgctcaagcaaagcacaaaactcacgatcatttgctttgtcgcaaaatgtagcatcaatggtgatcaagtatgttggcacaaagccgaaccagtctcgcatctgttgctcttgtctggccttacgccatccaccaacattgaacatgactttttcgcactgacctaacaccatagcttgcttgcttttatatgcagaagaggcccaagcacatgctaaaaattcttcattatcgtgaagcagctcagctatgtgatcatgatcgggattataaagaggtccaccaatagttaagtaattagcaacaacccatttttttagatctggtgctggtgttagtcttattgcttcttcttcatctgcttgatcaataaaatcagtcggtggaaatggtctgatctgctccatcttcaattctcgctaattcgtcttttatccagttaatgacatatcccgacaaaacagagtctggatgaaagcgctctattttgtaacccatctcttcagcatgatcatatcgatcaagactccatgctttatttgacagttttccactacgcccaccagaccaggaaccgccctcaatttcaatgagcaaacgcaatttcacaatatgaaagtcaaagcgccagtgtttggtatggatcggctgaaacttctgttcaaatccaatcgacaaatcctcaagctcttccttaagtgttgcctcagcctcgagatatttttgtgtaggctttggcagtggccggcttttaggtttagttttaggttcttttttccgagtaagccaaaagtattctgtagaatccattattcttacccataaaaaaaccgccctaaggcggtggctaaaaatagagacaactaactattatttcttaaaagttgccttataaagctttgaattaaagtaatccgtaatttctttaccttcggtttgaattttttcctcatttaaaggtaaaaaatctaattcatatttcaagctcatatactctggaataaatttctttataggcggaggtggtttaggtccaccttctgtaattttttcgataaatccagctaaccataaaatatactcaccttctgaattatgaggaggaatcaaactcacatctatttttactttacattcatctaattgtttactaaacaattcaacaaaatcaataaaattatattttaatttaaattctgttccctcaatttctctgcgtatacatgtcataagtaagttcatattttcaatacagtcatgtgaaaacaattcctcatctttaattttgttataaatattttccgcaaacatgagatactgtggcatttcggcagctcctcatttttataaagtatttttcttaaggtagtcctattataacaatgttgcaacaagaaattttccatttttagtttaaggaaattttaaaaattataaaaacgattatattcaataaattagtacgaataaaagctagggaaagtttgatttttctattgagctttaaaatggattattgtgtttaaattatcaatttaaaaagcttgcctagtaggcaagctcccccttttttgatatttgcgctgatcaataaggtttagggttacttaaagcaacacactgataatactgaaatattcaaaaataaaaaagcccacttcctatttttattcagaaatgggcttagcgaaaaaaaacgcttagacctgaaataggaaatatctattcggaaatatctccaacttcatattggcataatatttaagcactagcaatagggattgaattaaaaatatcaaatattcatatttaaatagataaagatttctttttttaaatggttttatttttagcctacataatttttttacttatcaagacttataaagaatatgtgcccatcaataggtaatacttaataaggtcttatgtgtagtaaccattaggctctagagagtaagaaatcacactgactaaaaataaaaaataattaattttcaatatcaatgatcatatactgcaaagttaagtatattccaacttctccattgttgagtgcctcatataagtcttcatcaacaaaatctccagattcatcatctagccatttatgaatttgaataatttgtatattcccttttttgtctattcttgctattgggtctattacggaccgaactatcaccttcttcttcgtctcaacatcaagcaatgtgataattgtcattttaaaatccttataaatatcctgtataacaactacgctcaatcaataaagatttttatatttaaattactccaatagcaatcttttcaatctaaaaaataaataaaaaacactttaatagtatgtgcctattagaaaagataccttaaatattctactagcaataaaaaaccgctttaagggctgttcatctaaaattcacaggtacttaatgaagtttttttttctgtctttgcatctttctgggctcacaaatttttccaataaagttagttaaccacaaaatactttcttcacgatcttcaaaatgaggtataagacttaaatctacttttatcttgcgatcagctaaaggcaaacttaaacaatgttcaaagtctattgagctgtacttcaatttgagtcttttttctgcagcttgattctttatctcagccataatgcgatttagattaacgatcaaattatttgaaattttattattttcatatacccgttcgtaaactgtctcagctacatcaatgtaatttattagctctacattcttattcacgacatttgtactccgttttttataattatccgtctaaaataatgtttatttgatttactaaatccttcgcctaggtaaagattgtttaaattctgtcaccctgattttaagtaaatatttgaatttattatgcaattactgagttttataatatttatatacatctttgttcttaacgccccttttttctatcacttgcccattgagttcaccatcaacgcaaataaacattgtactaatccataaaattatggagatcagcttaacacaaaaagaaaaagcccccactaatcaatagtgaggctttgccgtatttcccggctagcacatttaaaaatcgatagctaaaaaaaagccaacttgttagagtcagcttaattcaatcgtttgagaatcatgcttgcatagttattgtccgttgcaatcttctatcatttttatttttataaatataatttaaaccagccatgtgacattttgattaaatttcactcaacactttttttgttaaataagtcacatttaatcttattaatgcactaaccattacaacctataaacacaatgtgtatcaattacttctgcttgattttgtaaattacagtatccttagtttacctaactgccaaaatcaataacacaatggaacaccaaacacttttagacgaattaaattcgcagattgaatattactcaaaaagaactgactgcccaccaactagaattcgtattgggtataaaacctattacgaattaatgcagaatcctaaatttgccgatgaagtatcaaactccgctttagatccaaacaaacgcaaatacaaaaaattaaaaataaaagttactaaggatgacaatcaacttgaacttgaatgatttctcataaaaaagcctactctttcaagtaggctttccccttatgacttttgcgctgatcattaaggtttattgttgtttaaagcaacactcagatcttacagaaatacttaacaataaaatagccccgccaataatcgatatttagcagagcttcttaaagcttatacagtttatcgtggaagatatctttttgaacctgtgctattaaggcagtaatgtccacctctaggcccaacacaataagttccagatgtgcagtaacaagagttattagtcgttttactataacttcttggagtccgtgtagtagcagaacttctagttctagtattattatagccttttgattctctttgaggagttgagtaaacaggctgcctgttatcaaaactcccttttgaatatctataggtgactggtggagtataacaaccagcaaaactgcacaaatatttagtatcaatccattgttgtctatccatatttggatttaataacgcccattcatcttggtaccagaatacataaacttcacttccccctttcaatttaaagatttctttgccatttggcatatccttgactggagcggtatcaacactaatccaatttttaactggattaaacctttcaactttttgctgcgaaaagtctatggacggtatagatacacatccactaatacccaaagtaataactaaccctattaaataatttttcattttattaacttcttagaaagaataattttaatgcgaagtaaacaataagctacctaataaaagcaacatatactttcatctaatttaaatacataaagaaaaattaaaaaacccgcttctaaaaagaaacgggtcaaaaaacaaaaaactttcagcgcagtatttgtgacatatcatacaagttagaagatgtatttacaatatactttaagcttaattttttgatgctctcaaaatatccaaaactcgctttgacatttcatgcaagttggaccctattggtagccaaaaatgataattaatgttgtcacggttaaaaacttgcttgtagtactcagttttgaatgatggatcaatgtcagaagccttaagtaatctgccttctttttcgatcacttgcccatctaattcaccaccaacacagatattcatttttaccagcctggactatatagcaaaaaataaaaaaaatccgtaccttggggaaagtacggactaagcttttcaactgaaaaacactataatggaaatagacatcatatagtaagtttaatatacgataaatttcatgttttttcaaatcctaattaaaagcccacgattaagtgagcttttaaaacaaattggtgcaacgcttataactttgtccactatatcaaaaatatgccataaagcgtctagacagtcaacaagtctaaattatgcttttctactaattgagaagcttttaaacgttcaacgattttaatcattagatcattggcagttataacgtcgattccttcaaatgcttttagtgttaattgcaatttattattaattacatttgtaattattgatattttaccaaaataatcagggtagtatttcaaagtttcattaactttctcccgactaacgccttcatatagttttacagtgtatgttttcatttgaacctccattttgtcttaatcttttatcatgacctaataaataaaatctagcgcaactcaccataattgcgacctgagctttagattggtttgtttcttgagcaaccttcaacaatcctttattttcaaccttatttttaattaaacaaattaatgcaaacttagttgtaaaatctgttttatcagaatttaatagacttcgtaaaagtgcttgaatttgatccgcctcataatcactgatctcacatcgaatataagatttacttttttgtacttctttgccagcttcacgcatcaaccagtaaatttgattgatatgaagcccatctggcaaatcaccccctttcattctaactgtttcacaccatgcgccaaactgctctaaccaaccgtcaatagtatatttagaccaatccatttgttgtgtttttaaaactgcactcatttttcacctaccaattgctcaatttgtttaatcgccacgcctgctttcacttgctctgtgctgaaccgtaaaactgtaaaacccatcattgctgcggagttgtatttctccatatcccctatatagcctttgccccttgtatgacggcctccactccagatcccgccttcaacctcaatcaaaatttttgtaccaataatcagaaaatcagctctccatttgcgttttggatggaacttatattcctgttcaaaaccgatcttgcatgctcttaaatgcgttgccagaaccatttcacccacacttggttgtctggcaacttgctttgctgaacgccgctttttatttttctttatcggaaataacttgcggtattcagcaatgctgactgatgacatcaagcaccacctttcagcaaatttttcaactgattagcaaagcagttataaactcgtgctttatcttgatcgccaaaaaggcttgaagcatgagcatcgtgtttatacttttgaactaggttttcaattgaacttcttagctcaactaaattcgcttgttgttctttttgaatctcccaagcccactttccagatttaccctcaaactcactcatgactggctccttttcctctggcaacttagtcataacaccatctggaaatttaaaatctccatgccacttcccgttttcccaaatagaccaaatcccacattcatcactgttgtagtaatatccagcctgccaatgtgtcgcacctttagggcggcgttttaatatttgttcaaacataaccgcctccgtatattgattcgtaatcagcaattgcttgaagcaacttgtatccagccgattcaggcctgtttttgcaatgagacaagtcatatagctttacatcatcaatgccgccccatgattcgaccaaatcaaccgactccactagacgcttaagttcagaaaggtctacaaaatatttttctcggtcagccttgctaatctctacactttgaccacattggaactcgaaaccttcattccactcagttgcgttagaaggtgctgaatcaacgatttctttcgcgtattgcagccctttatctctaattaatttggatgctttcatacattcgccccttcaattagctgaagaatatttctaggtattggcataccctcccgacggcacatctctgcatattcatatggattatcaaaaggatctggacctaattcttttgcaagttcaggctctttttcttttgcctgaagtttttgtactggtgctggtttacggccattaatctttaaccgttccatcaaagatttgagatgcttttgcgcttcctcattggaaactggtatatgcactttctgctcatttttctgagctaataaaattggttcttggtaccaagcttgggttttacccttcagttgtgcttcagccttgtattcatcatagatcttgataaattccattttggctttgtacatttcaccgtcttggattagtaaataaacttggtctaaaacaaatttggtcaaggttgtaatttcttggttctgctctcttccgtctggcaatgtcacttttttgtgttgagagatctgagtgtattcacaagccttaacccaagccttctcagcgctccaccaatcatcacccatgcacatagcacggaattcagcgaagttaggcatgtatgtatttgtacttgcgtaaaatagcgctaagcctctttgaagttggttaggtgtaaccccaaccaatgctttagcaagctgctgttcaacgatttgcattggaacggcatttttcccctctactggaaaattcttattgaactgaacagcgtatttagttctgtaagccgcaattagttctttcaaaaaactttcaaatggtgctaattcattcatgattaatagcctccaaaatcttgtgacactggcgtaacgtcaatcacgtttgaacggttgctctcagcgtacatttgagtgaaataacccggttcttcaggaacgttatgagattgtgggttttcctgaatttgattttggcgaggctcaaatacaccctgataatttccgataattgagttttccagtgattggttagccaaaggtccaaacgagataagttttttaaggattagctttactgcgttttcagaaagtggttttttgatgctgatacgcatatcaacaaaattgttccacagttctgaatctacacatgcaggtagttcaactgaacgtggattaaattcatttggtttttctgttttaggtttttcagaaacagaccctctttttttatttatttttttattactttgagagttgtttttgatagtgatactttgtgtgttaaaaatttttactagtagcggtaaaaaatttttactagtgtagttaaaatttttaactagaagtggtaaagaatttttactagtttggccataaatttcaggtagtaaaaaatttttactagggaatttaagcactaaaccaacgctagtatcgttacctaatttgaatgtatttccatgaattgtgcttggttgttccacgactaaaccaactttaattaattcattaaggcatttaacaactgtcggtctactcttccctgtaatctcttcaaattgagttaaagagatggaatccatctccttattccagccacgagttttacggcaaataactaaataaattttgcatgcagcatcagagattttatttaaaacctcgtcaacaaatgcattaggcacttgaaaggaattaggcacaaaattactcatgtacaccgaccttaggctttacatacccaccaaatttttgaaccaagtcagcattagccaaactattaacgatctgccctgctaaccactgattagtgcgaaaacgctgtgccatagtttgtgaaaattcttcacgcgttattgcagcattattttcgtcataacctttggctcttagatttttacggttacgatcatgtagctcattgagaatcactaacgctggatcaaagaaggactgaatttcctgaatctgtttgtactcaggtttatacttaaattaactattcatgacacctccgctaatgcttgctctgcgcttgttagccggcgtttggcgttgagctctgctactgttgctgtacggatttcttttgatgaaaccagaatcaaatgattctccgatttgatagtccacaacctagtcaaagttttgtttttaacttcaaacaaatcatttgatttgaaagtacggcactctttagtaagcactacaacgtcacccactaaaaattctggctggttgcgttcggttgtttgatttgataaattgttttgcatattcatgggttcctaaatttgtgaatgcgaaaccactcctgttacagcaggtagtggttttttatttgaataaaatccgcatgtattcaggtgaagtgaatgcatgtgctaaataaactcgcgttgcttctgcaatttcaggtgagcaatacacatcactttcttgcacaaccttcaaaccaatggctgtcaacaaaaagctaataaactcaatctcagtccatccatttgatttcttttctgttttcatccgtgaaaggatgcttgcatcgacatttatcatctctgctacttgtctttgattgctagcgttaagtgcttgcaatatgagcgattcgttattgctagcgcttgcaggcaattcatttaatactttgctcatggtttagttcctaagcggttaatgcttgtaaatcggctttaagtttgcctttggttttgacttgcaggactgcttgagttctggctggtataccgttgttttcccacttccagagggtcacggttgaatatccagttttttcagacaactctttccgatttttgcagccgtggtatgtcatgaggtcactaattttcatggttacaccaagttaactatagttaataaaccaaatttaccacttgttaaccatagtttcaatagatcgtattaacattagttaatgtttttggaatatttgttatgtctttacacactcgaattaggcaaaaacttgaagaaaaaaaattaagagccgctgatttagcaagagcaactaaaaaatctcctgttgcagcaaagaaatggctagatggaactagcgtacctacagcagaaaatttgaaagtcattgcgaaatttttaggtgtgagtgacgattggttgctttatggtggatcggatgaacaagaatcgagtaacaatttagctcaattaaatgttattgatattgaagcatttaagcagaagtacaatattccagatagtgaagatgccgttaagtttgttcaagcgccagctaagcctttccctatacaaaaaagatatgttccagttaaagcctattcaaaaatgggaatggatgggtatttcacagatatgggatacgatggaaatgctggggatggctatgttccaactcatacagcaggtccacgagcctatggcattaaaggcactggcgactcaatgtttccagcaattcgtaatggctggtatgttgtatgcgaccctgatgcagatcttgtgccgaatgagtttgttcaggtgtgcttgaaggatggaagatgcacaattaaagaatttgtcggcatcaatggtggggttttaagtttgctttctgtgaatggtggtgagcgatttttctttgaaatggacgaagttgaaagtattaccgctattacagatatcgtgccgccaagtcagcacagacaagaacatccttattcgcattaatcacaggaagacttatggacaattcaaaacgaccaatcaaccagattattgctcgcatcaatgatgctgcgaaacatggtgaagctttggtgctaacagccgaagaagtgaagatcctctcaaaggacattggtgataaagtctttattccagtccttacaaatgaacaagtagtgcagttggtaaaagaaggaaagcttgggcagaaaattaacaacaccaaagattaataagttgtgaacccgacacagtactttagagcgattcgggaggaggaaataatgagtaaaacagtagtaaaagacaaaacagtacactacaaaaaagtagattttctaaaaggcgccaatctaggtcaattactaaaagcacaattgctggataaggattctttttactataaagccataaatcgtcaacaatttgtctccgcaacaaaagatgattttattctaattaatcatgctagttcacaccaaagcatgttctttggcgagttgattattgttgagtcaggcaaagctcaggctgtattaaagatagacagtgatgatgctactgaatttcccattaaaacctatttaacagatgatctgccagatgatgaagatggcgttgacgctacagaggttgtaagaaaagagtttattgatagtgttctttactttggtgttattgataaccatgtcgcaatcattcaatcaagatcacttaccgctagaaccttggagtcatatttgggctggcttttgggtgaagcagccaaagcattgccagagaatagtgcattaatattaaaagatgctccaaatcccactgttaagcaaaagcttgaatcaactccagctaaaactatttcaatctcatctggcattgggtcaacagaacttcaacctgttcatactgtcgaatcaagcatacctgcgaaaattgactataaaattgaagataatgtggttgatgtgcttaagtcagcttttggagttgatttagaaaatttaaaactagaggatgggcttgatgacgcaaacctaaagttaaaattaacacttacatacaaccgcaaaacctcaaaaagtgggcaaaaagttattgatactgtagcttcatccatgcgacataatgatgattatgttattactcttgaggatgggaccaaggttacggctgataatctaaaaatgagcggcaagatttcagttgaaacaatcaataataaagtttataacgacggcctaaaagttcaattgtataattggatgactaccaatataaattttggtgactaatatggctaaacgctacttacccttctacaataatgctagatttatcgcactagtgttagtcggtctgtttgctatattttcaataatttttaaatatttagagttaaatattacaataaatctggttcaattttcatttgtactgcttctccctttaagtcaaatttatttggcttataaaggtatgctcgatgcattaaagcttgatggtttaaatcagtcagaacgagataggttgacttcaactgtggacataagaagtaagtcatctttatatgtggctatgctttttattattcttgtttttagtatgtatatacttaatttattaggcttactttcagctaagcatcttttagctctaatactttctgttggactcacctcaatttttagcttcttcttagcttggtctgacttaagagaaatctctttgcttgaaaaaacattaaaagatcgcaaagaatcaagagaggcaaaagcaaaagtattgagcaataagtaaaaagcgatccaattcatctaatctacccaccaccacggtgggttttcttttttaatatattcaaattttccctgatattatgggattaagactttgtgccaacattgatcttaaataaccattaatatcggagaaaatatgaaaactgaaatcatagaagctctagcgttagagcttactaaggcaaccattgctgatactgatccttcaaccatcaatataaaaagtgctgatctttgggttaaaacctaccaggaatcactgaaagcggtagaagaagctttaaaagaacttaagccaaagcctaaagccacatcaaaacccatttcaggaatgagctaaccctgattactcacactctactatacttaccttgcagttattcttggtggcaaagtcatcaagaatagctttcagcgcatacgcgttccgaagcgtgcactctattttgaaagcggctgtgcaatcaccaaaaagaatcttttcagcacgatcaactttttcttctagttgatcaatattactttcctgaagcagtagtttctcaaccatctgcttgcgccattcaaacatttcttcgcctagactcatttctatcacctttgatagttgggttttcttttgtctattaaagcatgaattatagttaataaaaagattaaccattgttaacttttctcttgactaaaaaattaaccatagttaatataaatctcgtagacaacaaaaaagcacatcgactctcttaccttccgatgtgcttttgcaaactgcgagatcaattatgaacgtaaaagctacccctttcaactcatttgcatttgtcagcatggctgctcttgcaatctctggtggttctttagttgcttgccaattgcaaccagctttccaaacaaaagacgcacctactctttttacacctaaaactcaaccaagtacttacagcgtgttaaccgcaaaaatcacaggtaagcattctggagttgctgtaattaaattagatagcttccgtttaaacgttagctttgattttgaagctcatccagacagctacggcgttccgggttctgaattcaccactgttgatattacccaactcacagtaaatgaaatcactgacattaatggtaagtcatataacgatttcaccgaatttgaagacatccgcaacatcaatagccttctaaaaggcttcatcgaacgtaacaagttggtggaggcagcctaatgaaagattacaactgccctacttgcaagaagatgattcctgttgaccgttcaaaaatcaaagctggtgatgaggtttcattttgcagagtaacccaatcttctaaatctgctcgtttttcttcaaaagaaggaattgtcgattgccgtgaaggtgatgtggttttagttaaatatcgcaaagaaattattcctttaaatattaaggacgtctcacctgtagatgctcctagcccgcttacgtatgcctttgttggtgcatgcgaatgtaaggaggctgaacatgtctaatttcaaaaagcaccctgacggctataagtcttttttaggtcgtgatgataaagggctgtattcagttcgcatcggctggcaagtgtacgcatctaatgctaatggctcagttctttacaaagttaaagacggatttaagacgcctttaaatgtgttcaggttccaaactgactatccaaaagtttggaatgaactcacacaagaaattgattttcagcgcagaaagcagctcgctataaaactgcgtgaaacaaatatccctacctatgaccgcaaagcttataaaactaagcgcggcttcactggctcaagataaggataataaaaatggctctaccgattattactgctgaccaaactttattagttcaagcaattattgtgtacctatacgctgatccgggtttaggtaaatcatcgatgggctttactgcggaaaaagcaatttcttttgactttgaccgtggtgctcaccgtactggtgaattacgtcgaggtgcggttgtacaggttcaacaatggagtgatgttgcaaaccttacgccgcaggacttagcaccctataaaaccgtagtcattgataccgtgggtgcaatgcttgaatgcattaaaacccacctgttacttacggcaaataaccgtcaaaaagatggttctttaaagttaaaggctcaaggattagcgaaccaaacgttcaagcaatacatcaatactttgatcagtttaggtaaagacgttgttttcattgcacacgcttcagaagatcaaaacggtgatcaaattatttaccgaccagatctaggtggtaaaaaccgtaacgagctttaccgtatcgcagatgtgatgggttatctaacaactgttactacaggtgaaggtaaaaatgcccgcgttattaattttaaaccctcgcctacacatcatgcgaaaaactcaggtgctttaggtggtgaaactggtgaagtatgggtaccagatcttaaagcacatcctactttcttggctgacctgattactcaagctaaagatcacattaacaccttaacgcctgcacaacttgcagcagctaaagcccaagaagagctagaaaactggaaacaaagctgtgaagaagctgagcatgcaggtgaccttaatcaattaactgagtcgcttgataaagaacacatgtattaccagaacatgcgccaagcaatgttaatgagagctaaagcattgaattgcacgtttgataaacaacgtggcacttggattagtccaccagaatttaacggtatctcagatcaacaaagagatgaacttcaaaactttattgctgaacgtggcctcgatgtaaaaacagtttgtgagcacttcggcatagatgccctgatccaaattgaagcggcaaaactaactgcagttaaacaagaaattgaaaccttagcgaaaacggggatgacagcatgaaaattctaaataaagttgaagccaaacttgcttgggccaacggtgaattacttttagtaaataatactgagcgtaatggctgggaaccatttaacccttatgactttggctttgatgtttttgataaattcgaatttcaattaaagcctagaactatttttattggtgaatttgaggtaccagaaccattaagagttgcgccagaaaaaggttctacttgctcttaccctagcccaactgttgaattaggtgtgcagcagtttaagtggaatggatctaaaggacaattgcgcatgctccagcatggccaagttcactcaagttttgataatgcatttgctcattgctgcgcgattattaaaatcagcggtggtgagtttgcggaagacattctaaaacttctaaataagcctactgaagaagtcgaagaagaaaagccttcagaaagtcatgcggaatctctaaaagttaaaaattcaaaaccagaggttgtagaaaaagcacaaacagctgagccggctattgaatcagaaaccgctgattcagaatatcagaagaaacttgataccctgctgcaacgagttaaggactcaaaaacaccagacgaagtaaatgcagtttatcgatatacacgcacttggtctgataaacaaatggagcctttgctacttgcaactcacaaacgtcttgaagagctcgaaaaatctaaggcgcaagcaactgaaccaccttcactaatggtccagatccaaaacgcgcccgacctcacaacattagatgctttggaaatagatgtggccgcacgagatccacagattcaatcacgactcatggactttgttaagaaacgccgctttgaattagagaaccctacatctacgccacttcaagaggctgagcctgattatttattaggagacggtttctaatatgaaagatcagtacaagaaagtgagccaaaaacacatgcttggttttatgtactacttgcaattgctgggctacgtaatagtccggcaaggcatggatcaagcgatgtttctaaccaagcattatgcggtaccagtcgcttggcgccgcataacgatcgactatcacaaccggttaaataaacccgcgcagcagctttataaagagtttgttgaatggactaaagaagaatatgcagagatggtggcttaaatgacaggtaatgaacgtatcccttttgaatcacaattcaaaactacagaaatttttaaacgtgaaagtgctattcgtaaaaatgacatcctagcattcagtgaaacaatgaatggctatttcaatattgtaactaatgatgcttggcagttatggaataaagccaaagccgagacggtgccagatactcccacccctagtgtcactctaacttgcgctgaactaaaagaagcctttgattttggtgcgccagatggggaaaaagatcaattccagatggaaactgaaatgaccatcaaatggctccaagatggttatgacggtgaaggatactactgttggtatgctgatttacctgaggaaggttgcattaagttgggtgttagcgaatcgggagctgaaggatgagtgaatcaactttatgggcggttgcaatgcgacctgaaggttacagcccttttaagcaaacgccagcagcttcaaaagagatagctgagcgagctgttgagcgttatagaaaaatgcatgaaaaggaaggcaacaactttttcttagaaatttttgatgatgttatcaaagttcagaaatggcacggttcccgcaaagatcatattaaaaatctattttatgttgagagttggtttagtgaacctatgtaccaatgctttgatttgaagacagctgaacgtgtttttaaatttgatgaaatagtaatttgctacaagaaaggctctgcccctcttgtaaccaaaagctttgatgaagcaaaactattttatggatctagtgagacgggttttaaatatcagatccagccaatagaaccacctgaaaaccttttcaattggtttcatccagatattgaattgtttgacaccattgaagaaggagctgaagcctatacaagagaacagtgggcacaacttcaaatgaatcttagagttgaaattgaaactcaactattagattacgatgaaataccaaatataccggaagatgcagtagtttggccaaactggaagccagaaccgccagaacaaggactctttttaattgcagcatttgattcagaagatggccctgtactttggtgggcaaatcctaaagcggaaagtaaggagaaataaatgtcacgtttaactaaattagatcgtatgactcatgcagaaaaagaggctgctaagaaggaattttgggaagctgctgataatcaaacttttccacctgaaacagtagctattgttatgcacgtatccttaccgtggttgcagaagaaaagatgtgaaggtggcggcattccattctctaaacctcataaacgacaagtaaattatatgaagtctgatgttttggcttatattgaacaaaacaaaatggcacatacagcataagcggctaagtgccgcttttttaatcaccaaaaatagacctttaatagacttaaacttgaaaaatagaccgtatttatcaaaatagaccattaatagactatttttgtattgctaaagattgtgtaatattgcattgtattgctttaatataaattattaaaaatattgattttttaatatcgctaggtattgcttaatattgcaatgtattgctagaattgagaaagacccgctgaactttagggttcaagggtaacgacatgcagcggcatcttcggagcatttatttttaaataaatacctataaattcgaattttattttcaaattaaaatacctagacagacctgtcagtatattttttattctcttaactaattagttgttcttaaaaattaaatactcattatttttttaattattattcatttctacgtaaacattcctcataccatcctgcttggaaatcttcaattgcttggcgtttaaagaaacttgtcttaaatactttggcagcataagctgagctaattaagtcttgataaagctgcttggctttttcatctgctagcccatcggcaatttgttgtaaatcttgtgctggtactttttgctgtcgtgcttccatcacgttataagcgaccttttttacgatattacaaatatccggatcagctgtactttcattagcatagcaaccggtggcaataaaacttaataataatattttaaatttcatatccctatcctattattcatcttccgttcttaaaaaagtaatagatgagaagacctattcctttcaaaatgttcatccaggattaattacataaaaataaatgatcatgaccacaagcaagatggaagcaagtgttaaataggtgccgactgtattaaaactctgtaaaaattttaagatctgcatttcaaatccagagaaaagttgaagtaattaacagaagaaatttagcacaactaaataatgccaatcaattcacacttttaaatttttaacgtgatttaattcaaatattattcattacattttatccccaaagtccctttatagtagtcagttgcacttttcaaatctgacaataatttttcttcagtatacggttttggtgaaacttttattaatgcaggcatgtattgttttttatacacatcaggatagtcatgacataaaattttaactttaacttcttgaggggtatttggattatctaactgatctaaaaattcaccaatttttcggtccgactcttcaaattgagctttataatcaatttgaggtgcctcagattctgcctgtttcgtacatgcgctgagcaatgccacacataacatcattgttaaaatttttaacttcatagatttcacattttcatattcatctttaaatatacttatcctgattaaatgtaaataaatactgtaaatacgtaaaaaagaaaaaattatatgtagacagtttctcctaacaacaaaactatttttacttggtctaatacattagaagactaatttttaataatttttaaatttcggtgaagccatagaaaaacaggtataattttactcgactgacctcaaatctttgttagatttctccatgaatgaattaagttttattagaaaaaatttaagatctagaagacgagctttaacccaatttgagcaaaaacaggctcagcttaatgttttacattgcctaaatcaccttcctatttttcattcatcaaaaaaaatcggtttatatctgcatgctttcggtgaaatccataccgatcttcttatcaaattatgttttaaaaagaacaaacaagtttatttacccatgatttgttcgatgaagcaacgtttagtatgggtaaaaataaataaaaaccaatatttaagtcgtcgtttttctcatcacccattgggaatgaaagaacctatggcgactcgcggaaaacatgtagcacagcttgatttgctacttatgccacttttagcttgcgatcactatgggacacgtattggtatgggtggtggttattatgatcgtacattagctagtgctaaacataagccctaccgtttaggattggcacatcaatttcaatttattgaacacactttagaacgtcaaagttgggatcaaccattagatggtttactgactccacagcacttttattattttaaaagatgatttttatataaaatttataaaatctccaatatatccttttacttttttagctccttaaaaaacgaaaaagtaaccaccctaaggatggttactttgccgtgacagaccgttttaccaacttatattaacacgtctatttggcgctaaacattgaataagttgtgaactattgttatcactacactgcttgtataagtcggtctggctattcgcctgtatttgtatacggcttggttcaacaccttgtcgtaccagtaacttggcaaccgtattcgctcgtttagatgataactcttggttataactaaacttacccaatgggtctgtgaatccagaaacaataattggggttgttgttggacttttcttaatttgctcagcaattttcacaacgctattagtaccttcttcaatcgcactcgcatcaaatcgttcaaaagcaaataggacactcgctgtacgatctgcaattacagtgctacgttctggtgcctgattatttgctcccaaaacaactaaaccttcacacgcttcacccttccaagataaacgttctgctaaatagtgcttatcaaaatcaatacgcaactggcaacgctggtattggtgtgtgttgggaacacggatatctagcacatagttccaaacttttactgcaaaaagcccttcactaaattgtggattgcctagtaaagctcgaatttgatctttatttagtcctgtatctaaacgagcaacatcttggtattcataacgttttacttgtttcaaataactcttttcaatcgctggaaaatgaattttctgttgctgagcctgttcatttgcataagttgtgactgcgaaaccagcaaaagctgctacgactaagctttggattgttttgttcatctctataatctctttaatctgtcgagcaaggagagcattgccctcctaaccagtttcttaattaatcacaccactaataccaacgcggacgcttggctcaccttgagaagcagctgccacaccacctgtaattgaccaacggccattgtcagaggttttgcgtaaggtcacaccgactgcgttctcaccaccatgatatgcagcaccaacagcataggtatatttacctgctacaaacggcgcattttctaaggccatggcagcggcaatacctgcattagcttttttctcaacgtcatcaatacgtttattagtgtcatagaacacttgttgtaactgatcacccagattggtaattttgttacccaattcttggttcgactggtttaaggtcccaatcgcatcattaatattgttcttacctgtaccaccaatattgttggttgtaattgagccatctttaggatcaatcgtagtatttccaccaatactgtttttgatgctttctgaaattttatggatttgtccaccatttacagcttggttcgaaccagctttaatctcaccatctttaacaccttgaacaacacgatcaccctctttaccagccatattaatgctagtaccgccagaatctttaccgaccgtgatttcaccatttggtttttgctgttgaactaacccagctttaccattagaaatgttatcgatgttattctgaatattcttaatatcattcgagttcttatcgacttgattttgaacattccataattgaccaccattcacggcatctttagagccctcagcaattttaccgtcagctacatttttcagattggtacctttttctccaccacctaaagtgactgagttcttgtcgacattgccatttttatctttgtcatactgcacagcatgatcagaaagcttgccaatatctttaccaatttgatctttaacttcgttaatttgcttgtctaattggcctttgttcaccgcatcttttgcattaataccgtctgcaacattggtaatttgtttaccacctgcattaataccattcactgtgatgcttggcccacccttaatggttagaccttgttgatttaagacatggcccccgacattcacgctatcgaacttcacatcttttaacatctcaattttgacaccatcttctgtggtacgggtaatgatgttctcgccactagttttatcttcagcagtttctggattagccccacccacaatattgatagtgtcaccaagcttacggtgaactgctttgccttgggttgttttctggtcattcgcaccaaaatttagccctttttgagtcaagtcatttacaccattagtgactttttcatctacagacttaattgcgtcattgatgttatttttacctgttccaccaatattattggtcgtcagactaccatccggattaacaactgtatttccaccaatactgtttttgatgctattagagatatggtgaacctgaccgccatttacagcatctttagaattttgtgcaataacgccattagccacatcagtaattttcttaccgccggcattaatgccatctttagtaatgcttggaccatctttaatggttaagccattattattaagtacgctatcacccgtggttacactatttaatgtcagatcttttttagtcgacacttcatagtttgtactaccatctttattaacagtttcttttacaacaatgttgtcgccttcagttacagtagtctttgctttcttagctgtattttttacttcgctaatcgcatcattgatgttgtttttacccgttccaccaatattgctagtagtcagactaccatccggattaacaacggtatttccaccaatactgtttttaatactgtttgaaatattgtgaatttggctaccatttactgcttcttttgaagtcgatgaaatgtggcctgctttcacattatctaaaaccgtaccatccttgccttttaaggtaactttatctttggtcttggcatcatcgtatttcaccgcagcatcatcggttgcattttgcttggcagcaagattgtccaactgactcttattcactgcatctttagcattgataccatcagccacattggtaattttcttaccgccggcattaatgccatctttagtaatgcttgggccttctttaatcgtcaaaccattcgtatttaatgtggtgttgccagtggtaacactgtcaaacttcgagtcttttaacagttcaatctgaataccatctttggtagtacgggtaataacgttctcaccgctggtcttagccaccggagttgacgcagctgcaccacctacaatattaagcttctcaccaagtttacgatgtacatctgcaccgctattaccagcaaagttcaagcctttgttttcaagctcagtcttggtgctatcaattttggtattcagctcagttttggtgttaccaatcgtgttgtttaactcagttttagtatcgttaatctgagttgttaactgatccttggtattatttaacttagtgttggtatcagcaatctggtcaccaaggtctttcttggcatcattcagattcttgttggtatcagcgatttgattacctaaatcttttttcgcatcatttaactgattattggtatcagtgattctgccattcaagttatctttgactttggtgagctgatcaacatttactgcatctttggcattgataccatcagctacattggtaattttcttaccacctgcattgatgccttctttggtaatgcttggaccttctttaatagtcaaaccattattattaagtacgctgtcacctgtggttacactatttaatgtcagatcttttttagtcgacacttcgtagttagtgctgccatctttattaacagtttcttttacaacaatgttgtcgccttcagttacagtagtctttgctttcttagctgtattttttacttcgctaatcgcatcattgatgttgtttttacccgttccaccaatgttattggtcgtcagactaccatccggattaacaacggtatttccaccaatactgtttttaatactgtttgaaatattgtgaatttggctaccatttactgcttcttttgaagtcgatgagatgtggcctgctttcacattatctaaaaccgtaccatccttgccttttaaggtaactttatctttggtcttggcatcatcgtatttcaccgcagcatcatcggttgcattttgcttggcagcaagattgtccaactgactcttattcactgcatctttggcattgataccatcagccacattggtaattttcttaccgccggcattaatgccatctttagtaatgcttgggccttctttaatcgtcaaaccattcgtatttaatgtggtgttgccagtggtaacactgtcaaacttcgagtcttttaacagttcaatctgaatgccatctttggtagtacgggtaataacgttctcaccgctggtcttagccgtcggagttgaagcagctgcaccacctacaatattaagcttgtcaccaagtttacggtggacatcactcccgctattgccagcaaagttcaagcctttgttttcaagctcagtcttggtgttaccaatcgtgttgtttaactcagttttagtgtcgttaatctgagttgtgagctgatccttggtattatttaacttggtgttggtatcagtaatctggtcaccaaggtctttcttggcatcattcaaattcttgttggtatccgcgatctggtttcctaaatcttttttcgcatcatttaactgattattggtatcagtgattctgccatttaagttctctttgactttagtgagctgatcaacatttactgcatctttggcattgataccatcagctacattggtaatctgtttgctaccagcattaatgccctgtttggtaatgcttgggccttctttaatagtcaaaccattcgtatttaaggtggtgttgccagtagtcacactgtcaaacttcgagtcttttaacagttcaatctgaataccatcttgagttgtgcgagtaataatattttcaccgctggttttagccgccggagttgacgcagctgcaccacctacaatattaagcttgtcaccaagtttacgatgtacatctgcaccgctgttaccagcaaagttcaagcctttgttttcaagctctgtcttggtgttgtcaattttggtatttagttcagttttcgtattaccaatcgtgttgtttaactcagttttagtgtcgttaatctgagttgttaactgatctttagtggtatttaacttggtgttggtatcagtaatctggataccaaggtctttcttggcatcattcagattcttgtttgtatctgtgatctgattacctagattcgtttttgtatcatctaacttctgattcaggttagtaatattctgggtattcttaccaatattgctcgtattttgattaacacgactatcaacatttttaagctggcgtactgttactgcatctgagtcagctgagccatcttctacattggtaatacggcgttcttttccagccgacccaacagaaatcacaccattagattgagaagcatcacgattagtcaggaaagaagttcctgttgcttctgtcgctacagcatcttggcctaaagcaacactatttttggcttctactttactgcgtgcgcctaaagcaacaccaccttcaactaatgactgagcaccttggccaactgcaactgcattttcttgatcggcaattgcaccgccaccaatcgctgcagcatttttacccgtggctttagcaccaccacctacagcagcagcattttcatttgtagcctcagctcctttaccaattgctgctgaattatcacctgttgcctgcgcaccactaccaattgctgcagaactgttcccagtcgcttttgctccttcacccggtttattaccagagccaattgctgttgaatttgtacccgatgccaatgagttaatacccattgccgatgcgccatcacctgttgcttgtgcaacagcaccgaatgcagcggcacctttacccgaagcatttgacatgacgccaaaagcagaagaagcatcaccagttgctttagaggtcataccaaaagcagaagaaaacgctcctgtacctacagcttgaaccccaacagcagttgaaccatgattcgcttcggttgttggatatttacctgcctgtaaagtaccaccagtaatttccgtataggtattacttaattccgtatcacgtgcgattttatcgacatcatcaccaccaattgcaacagaagagttcccttttgcaatcacgtcggcaccaattgctactgactgatccccaattgctttcgtctgatcaccaatcgcaacagattggttactattgaccccttcggcaccttgagtcgatgcattacgacctatagcaacatccccacgtcctacagtttggctactacttcccattgcaatagcaccagaacctattgcctgtgcactacccccaatcgccattgcctcacgaccagcagcagaagcatttacccctacagcaatagcattacgaccagtcgcaccatcattttcaaagttaccaccttgctgaccattgtcattaatactgacataatgggtacgagcagcttttaactgacgcacagttgcagcatcagaatctgctgcaccatctgctacgttttgaatacggcgttccgttccaatatctccgattgacaaaacacctgttggtgctgattgtttagtcaagtaactttcaccagttgcttgactggcttttgaatctttacctaaagcaatactgttttccgcttcagaacgggcacctttaccaattgctacgccgccttcaaagctagcttctgcttggtccccaataacaactgcattatctttttgtgcctttgcaccggtaccaattgcgacagactttttacctttagactctgaaaatgcaccaattgctaaagcattttcttcagtagcaaccgcacctccaccaaatgcaatcgagtctttacccgttgctttagtagccatttttggttgataagcagcgcctacctgcccagcaacagggtcagcattttcaatatctggtgagccaatcgcaattgaacggtaaccttctgcagtggctgaatgccctatggctaaagaacctttacccgtcgcagcagcaacattaccaatagcttgtgagaagtcggctgtcgctgcagattgacgaccaactgcaagagcagtatttccagaagataaagcacccgtaccaattgccacacctgaaataccttgagtcgtcgcataagaaccaattgctgttcctaggcctttctcaactacagcccccgtaccaacactgattgctccgccttgtttcattgcgccagcataagcaccggtagaattattatatggattattacgatttgcgatgttagagccagttcggtcttgagtttgtgccccgcagccaatagcaatatctttttgattagccgtattagcgcttccttcacgacatgaagttgtaccagaaatagatgttccttggcctattcccccttcggtatttgtcccagcaaaagcatttggagcaaaacaaattacacccgataaaactgccgctgatacatttaaagtttttgatttagtctttgttttactttttgcaatttcagaggttgcaacccatgctccaatcgaagcattccaaatgaccttgtaaactttattcataaaacttctcagacaaataccgaactcaacgaccaataaaaatgtacaaatacatttttaaaatttttggccccaaaaaaagaggcggcatcctaattgaataaatttaaagggtaaatataaaaccgaaataatgataagaaaatttgtgatttcaatcacaaaatatatttttataattaattttaagtttttgaatttattaataaaaatttaaattataaatattatgtgttgtttttgttaataataagtaattttattttaaaatagaataatagctctaaataaatgtttattttttatcaaattaattaaatataaatatttttaaaaatcaattttactttaaaaaaatagaatattagctctaaaaaataatatctaattttatttaaaatatattataaaaatacaggtgtatattataaattatagtgtgattattctaatataagacaaatgatataaataattaatatttaaatatacttaataaaaatatgtattttaaaattaaaactaaacaaataattttacttacaaacaagtcttgctccagtaagagaagaagaattattaagtaaaaatgagtagccgctctacaaaattttattcttcttaagaattaatctattgattcataacatttttaaaaaaaagttgactaaattagtccttttttcaacattttctattgtcatgcccttgtaatttttaaaatacacatcactataaaaaacatggcaacctcgttgtcactcattaggagtgcccatgtctgaacttattatgaatgaaaaaactgacttagagcctcaggttccaagtgtattaccactattagccttacgtgatgtggtggtttatccacacatgcagattgcgctatttgtgggtcgtgaaaaatcgatcaatgcagttgatgtggctcgtaacagtgacaatttagtatttgtagttgcgcaaaaagattcgcttacagaagaaattgatcacgacaatttataccagtacggtacagtcgctaagattgtacaagtagttaatcatgaaaatgatgaaaactgcattaaagtacttattgaaggcttacatcgttctaagttgaaaaaaattatcgatgaagatagttatttgactgccgaacatgaattaagtccaatgacgattaatgtagataaggcaacgcaagaaactcgtttacaagagttacgtaatttatttgctcaatatgcagaagcaaaattacgtaatgcacgtgaactggttgctgctgccaacaaaatcgaagacttattgcaattgatgttcttcgtagcaactcgtgtgcctctaaatattgaaattaagcagaaatttttagagtacgatgagtttgaagctcatttgcaagagttgatgaactacttgatgaatcaatctgctgaacagcaaattgagcaaactttacatgacagcgtaaaacgccaaatggaaaagaaccaacgtgaatactttctaaatgaaaaaatgaaagtcattcaacgtgaactttccgatatgaatggcggtgctgaagatgacgttgctgaaatagagaaacgtcttgctgaagctgatttacctgaacacgtacgtaaaaaagccgaagctgagttccgtaaacttaaagcaatgcagcctgcatctagtgaagctgctgtggtacgtaactatctagaagtgattctagatacgccatggaacaaagcgagcaaagtcagtattaacctgaacaaagcgcaagagattcttgatgccgatcattatggtcttgatgacgttaaagatcgtattgttgaatacctagctgttcaatcacgtgtgaaaaaactcaaaggccctatcctttgcttggttggacctccaggggttggtaaaacttcacttggtgaatcagtagcgaaagcaacaggtcgtgaatttgttcgcatggcgcttggtggcgtacgtgatgaagcagaaattcgtggacaccgtcgtacttatattggtgcgatgccaggtaaaatcgtgcagtctttaacaaaagttggtgtgaagaacccattgttcttactcgacgaaattgacaagatggcacaagactaccgtggtgatcctgcttctgctttgcttgaagtgcttgatccatcacaaaacagtaagttcaacgatcactatttagatcttgatcttgacctttctgaagtgatgttcatctgtactgcaaacagcatgaatattccagaagccttgttggaccgtatggaggttattcgtctaccgggttataccgaagatgaaaaagttaacattgctgagcgttaccttgttcctaaagcaattaagaacaatggtctacgtccaaaagagttaactattcatgaagaagcgatccgtgacattgttcaacgctatacacgtgaagctggcgtacgtaatttagaacgtgaagtttctaaaattgcacgtaaagtcgtaaaagaagcggtaagtaaaaaatctaaaaacttacagcttgacgttacctctgccaatcttcctgaatacctaggtccacataaatttgactttggtatggccgaagatgaagcacaagtaggccgtgtaaatggcttggcatggacttctgtagggggtgaattgcttactattgaagttgccgcagttaaaggtaaaggtaaattcattacaaccggttcactcggtgatgtaatgaaagaatcaattaccaccgcaatgactgtagtacgcacacgcgccgatgaacttggaattgaagcatctcgctttgaagaaactgatgtacacgttcacttacctgaaggtgcaactccaaaagatggtccatctgctggtttggcattaacaactgcacttgtatcagcatttactggaattgcgattcgaccagatattgcaatgacaggtgaaacaagtctaggtggtcgtgcgatgcgtatcggtggcttgaaagagaaacttcttgctgcacatcgtggtggaatcaagctcgtctttattcctcaagataacgttcgtgatttggcagaaattccagacaatgtgaaagaaggattagaaatcaaagctgtgaaaagcattgatgaaatcttacctttagcattaacttcgatgccaaagcctttacctaaaacaccgattgtaaaaccggtggaaggctcaaaagcagcgcgtcactaattcacatataaaaaaagagggcttcggctctcttttttttgttacacaatttgattgaaaaatatccaaccatcctcataataagaagtaagagtaattaattctattatttgctcttgtctatcttatgtcacagatagccttgtttttattctctatgatcatctgaactccagacagatgatcatttgatcgcagtccaacaccgttttttggactgcgttttttatgcccacttactcccccgcagttaacctctcctcaggtataatgtgccagctgttttgactgaatagacaacatgaaaattcgtattctgaccattggtcaaaaaatgcctgcttgggtacttactggttttgaagattatttcaaacgcatccagccttttgttcaaactcaggttattgaactcccaatggcaaaacgcggtaaaaatgattcagaagcagatattttaaaatactgtcaaatcgagggtgaaagtattttaaatgctttaaaacctaatgagaccctcattgctttagaagttggcggacgcgagctcagcacagaaaaactagcagacaccatgaaacaatggatgcttgaaggtaatgatgtggcactcgctattggtggcccagatggcttgtcagatcaagtacgcaaagccgctgcttggcactggtcactttcaaaacttaccatgccgcaccctttagtacgtattttattaatcgagcaactttaccgagcaatgagcattaatcataatcatccttaccaccgtgcataaaaagaacaaacgtttcattttaagaacaatacgttgaaatcaggatacttttaacatgtcctgattttggcataatgactattattctgcttttcaactcaggtgtaatgaaatggaactacaaacccttcccggactgtttatttcacatggttcacccatgcttgcacttgatccagaacaagtgggtcctgccttacatcgtcttagtgtaaatctgcctactccaaaggcaatcatagtgatgtctgctcactgggaaagtaaagcactcgaagtaagtagttcgactcgtccggaaacttggcatgatttccgtggtttcccgccagagttatatgaaattcgctatagtgcccccggtcaacccgaacttgcagaagaaattttgaagttgttagcagatgctcattttgtcgcacatgccaatagcactcgccctcgtgaccacggcgtatggatgcctcttttacatatgtatccagaagcagacattcctgtcgttgaaatttctttacctatgggcttaactgcacaggaaatttatcgaattggccaaacgctagcacctttacgtgaaaaacaaattttactgattggttctggaagtattactcataatcttgctgaactgtcttggcaaggtgacaattcgaaagtacctgaatgggcttcaacttttagaaatacagtggtgagtaagctgagtcatcaagattatgatggtgtactggagtggcaaaccctgccgtttgtgaaacgtaatcatccttcacttgagcattttgcacctttgtttttcgctatgggtacgggacatcgttttacgattgttcatagtagcttcacaatgggctcactaggtatggacatataccgctttgattaatttttggaaaataccccgttttgcggggtataccactatttttgttgaaaattagaataatttacaaacttatacattttaaaaaccgaaacaatcaaatgtttacattttctttttttaagaatgttttaagcttagtgctgttgtttttttacttgaagttttttaaatgaaaattaaatatttaattcttgcgttattacctttttctttgatggcgtgtcaaacagtttcaaacactcaagctccaattgtatctgagcaacaacaaaatcttgctactactttaagtgaatatacttggacttatcaaaatgtaaaagcatctaagccacttattcttaactttaatgcagacggtaaattagcaattaacactggctgtaatggccaaggcggtacttggaaagttgaaggcaaccaacttataacttctccacttgcatcaacaatgatggcttgccaagacgatttaatgaaacaagaacaattgtctaatagcatctttagtgaagcgaaattgccaatcgaaattagtaataacaatggtctggtaatcttaagcgtgacagataaagcaggtcaaaagcatattttccaaggcgaaaaagcaactaatactcaagctttaactgattattcatggtcataccaacctgaaaatactaaaaagccgattgttcttaactttacaaacgaccgtttatcgattgatacaggttgtaaccgccaaggcaccacttggaaagttgaaaacaatacgattgtaacgactgatgtcatgtcaactatgatggcttgtgaacctgctttaatgaaacaggaacaattctctagcagcctcttccaaaaacgtgcaattccatttgaactcaatacaacaaatgttgatcaaccaacattgacagtaactgacgctcaaggccagaaatatacatttacgggtaaaatgacacctgaagcaaaatatcaatctgaaggtaaaactgttttccttgaagtagcgccagaaactaaatcttgcacaggtgttgcaccacaaacttgcttgcaagttcgtgaagttaaatatgatgacaaaggcgtaaaaacttatgctgacaaaaattggtcattatattacggtcaaatcgaaggttttgaacacaatccaaaccaacgcgtaatcttacgtgtaaaacgttttgaagtgaaaaacccggcagcagatcaatctagccaagcagatgtattagatatggttgtagaacaagaactcgttaaaaagcctaaaaaataagttttagactaaaaaatccgatgcttttgcatcggatttttttatttctatattttaatagataccttgtgcaagcatcgcatcagcaacttttacaaaaccagcaatattggcaccatctacataattcacagtaccatcttctttagtaccgtatctaacacaattggcatgaatatctttcataattgcatgtaagcgttcatcgacttcagcatgtgtccagcctaaacgaatcgcattctgagacatttctaaaccagacgttgccaccccacctgcattagaagctttaccaggcgcatacaaaatcttagcttcaataaaatgctcaacagcttcaagtgtagatggcatattagcgccttcagccacacaaattaccccattagcgatgagcgttttggcatcttcgccagttaattcattttgtgttgcacatggtaaggcaatatctacaggaatatgccaaggtgtcttcccttcaaaatattcaaagccatgcttagaagcaaattctgaaatacggccacgctggatatttttgagttccataacttcagcaagcaactcatctgtaaaaccattttttaaataaacggtaccatttgagtccgatagcgtaaccacttttgcacctaagaacattgctttttcagcagcatactgcgcaacgttaccagaaccagatatcgaaacagttttaccagcaaaagactgcccacgtgtttttagcatttcttctgcaaaataaaccgtaccgtagcctgttgcttcagggcgcattaagctaccgccaaatgaaattcctttacctgtaaacacacatgccgtgtcattactgagctttttcatcatgccagccatataacctacttcacgtgcacccacaccaatatctccagcagggatatcagtatttggacctaaatgacggtaaagctcaatcataagtgcctgacagaatcgcataatttcagcatcagatttacccttagggttaaaatctgaaccaccttttcctccacccattggcaaagttgtaagtgagtttttaaaagtttgctcaaaccctaaaaattttaaaatagataggttgaccgacggatggaaacgcataccacccttgaatggaccaattgctgaattgtattgaacacggaaagcacggttaacttgagtctgcccttgatcatccatccacgaaacgcgaaattggatcacacgttctggttccaccaaacgttctagcaatccctgctcggcatattctggatttttttcaataaatggccacaagcttgtcatgacctcttcgacagcttgtaaaaactcaggttgatgcggatcacgcgcttgcacgtaattcaggaattcattcaggttgttatatttcaatgcacggtcctcagcatagtaatgaattaaattggtgcaatacattttaaaatgcatcatttagcagcaaaatattaaatccctttccatcaattttaacaatagttattttaaattattttattcttcttaattatcataaacttatttttagaaaaactgtctaacaatcaataatagtcatttatcttttcacttttattgatctattattgtgcaatattggcgacattttaggtcaatcaaaaagccaataaattcgttaaaatccattgaccttacttaggtttttcttcattatcgcatcgttttaagcaagctattttcctctatgaatccatctatttctctcatacgcgagattgatgcgttattaccacaaacacaatgtggtctgtgtgggcaccgtgacggctgtctaccttacgcaaagtccattgctgaaggtgaagaagcaaataaatgtgttcctggtggacagccagtggcagatgcactggcacaattattaaatcgctcattattacctgctgaaacgagtgtctggcctgtacaggcggatggacgcccacaacgcatgaaggcaattattcgcgaagatgaatgcatcggatgtacaaaatgtattaatgcctgcccagtagatgccattattggtagtggtaagctcatgcatacaattttgactgatctatgcacaggttgtgagttatgtattccaccctgccctgttgactgtattgatctggtcgaagacactcaagcattgccaagcgaacagcaacgcattgcagaacaaaatgatttacgtcaacgttattacgctcatattcaacgtgaagaaaaacgccgtattcaccgcaaaggccctgttgtacgtgctgaaatagatactcagctgtttgcacagttctctcaagcacttgatgatttaccttcaattcagctcatcgagaagccaaaagaagcgattgtaagcgatgcaaaaaccacaattgaattagcgaaaattcgtactcaaattaaaaagttggaaaagcagctcagtgttcgagaagatgccaaaaagcgtcttcaacttgatgaactacaacagcaactcattcaattacaggaggtgtgaatggccgtcaaaaatatgacgaaaaagcagattcaaattttctttgaacgccttcgtgaacaaagaccttctccacagaccgaattaaagtattcatcaccatttgaattgctcattgccgttatgttatcggcgcaagcaaccgacgttagtgtcaacaaagcaactgataagctctatcctgttgcgaacaccgctgaaaaaatctataacttaggcgtagacgggttaaaagagtacattaaaacgattggtctttataacgcaaaagccgaaaatgttatcaagacctgtaagattttaatggagcagtttaacggtgaagttccaagtaaccgaaaagatttggaagctttgccaggcgtaggccgtaaaacagctaatgtggttttaaatactgcattcggtcaaccgactatggctgtcgatacccatattttccgtgttggaaaccgaacgggcttagcaataggtaaaaatgttcttgaagttgaacaccgcttagtaaaagtcattcctaaagaatttattttagatgcacatcattggctgatattacatggtcgttactgctgtattgcccgtagaccaaaatgttcagagtgcgtggttgctgatgtatgtaactggccggaccgctttgaatttggtgctcaaaaacaaattgcggttaaaaatattgaggcagaataaaagttgggtatagcttatacccaatttggttactttaaacgcttttgctgttttctttcttctttcgcttgtttttgtacttttctcagcattttgtagctttgatacagtaaaaataacaatagtgccagactcagcaataccaccaaaatcaaaatgattttcaaatcattctcctgcacttaatgaaagaaaagagccctcacaaagagggctcggtattacaaataatattaaattatttgtctaagatgttgaacaaatctttttgtacatcttcaattgtacgcaagccatcaagcttgtcataagttggcgcattttcaccagaagcagcacgaccttggtagaaaccaaccaattgttctgtttcagtgtgataagacgctaaacgcttacggattgtttcttcttggtcatctggacgttgaacaagatcttcaccagtttcatcatctttaccttccactttaggtggattgtatacaacgtgataaacacgaccagaagcaggatgctgacgacgaccagaaagacgttttacgatttcttcatcaggtacatcaatttcaattacatgatcaatgctgatcccttctttttccaaagcttctgcttgaggaatagtgcgtgggaagccgtcgaaaatacaaccattcacgcagtcaggttgagcaatacgttcttttactaaaccgataatgagttcatctgaaactaaaccgccagattccatcacacttttagcttttaaacctaattcagtaccttcacgaattgcagcacggagcatatcaccggttgaaatttgtgggatattgtagcgcttacagatcaactgagcctgagtacctttgcctgccccaggtggtccgagtaagataatgcgcataaaaaacatcctcatttaaaacaatgaatgtgaggtctggcagatttagtttcattgatcttcaatagatcctgcccgacttcgaattataagaaagccacaaacaaatgtattgtaccagcaataaatccggttaccccacctagtacaataagaatccactcgtcctcttgaaatgctggacgtaacaaattctgaaactcttttggtgttagttcacgaatacgctctttaaacatttgaaaaatcttctgtgcccggcttgcatttagtgcagggtcacataccggtcccatcgtaatttcaattgaacgatcaatcaagtccgtctttaaccttgcatactctcttgggcctaaagaaagctgtaaagatgttcgaacaagtggagtttccatgatttcgttaatatgacgtttaacaatacgacgcgttttgtccttgcgtgaaccatacatcatttctgtcataattgattttaacgtaatcagatcttctgtcactacgcttgagaagacttctgaaacttcttcttgacgcttcatgaaagccccttgaacattataagtaccaattcgtaaaacaggtacaatccaagggaacttacgatcttttgttaatctaaatatttgcggataacgaatgtaatgcggctcaatcgggttaaataccatccagattgcaatccagttagttaaaaagccccaaatagacgcccaaaacggtactgtccaatgccaaggcaccacaaaccagaccaccatttggaaaacaccaaagaacatcccgattaaagcactaatatgccaaataaagttgatttctttttgtccaacttttaaaaacatacgtaccattaaacggcgatcaccttccatttggctcaccaccatttcacgcatatcaaccagtgactcaacgttcatagtcagctcagtcactaattctctgagtacacctggcaactgcttatgcgcttgagcataaatacggcgtttaatcgaataaggtaaattttcccaaagcactgcattacgatcgatcatgacttcatcaatcaaatgctcaagttcaaatccgacttgctcaccaataatacgcgccatgtcttcagggtccattgcttctaaaaactcacgcaaagaacctaacttggataaagtattatcggtaataattccagagatacgtccagctttacgtggcacaataccttgccagccgactggtaaaggacctaaatgaaatccccaaaacttgattgggtaaaacaccatttttaaagccatccacacatgtgcccatgtgacaaaggcagtgaccggaatgatactcaaaacggcccaaaaatcaggtctgtgtaaaaaggtctgccacaatccgctgacgtactctaacatgtaagactctcgtatttatttgtgctctgcttatggcgagttaacgataaactgctttgttttataaaccaaaacttagagaataagaaaattgtatttgtggtttagtatctgcagcaacatcaccattctggtccgttaatttttccgctgcgccgatacccacactaaacgtactaattctttctgaattcaacaatacatatgccaaatcaacaccagcacctaaacgagatttataatctccatctaccgatttactatcaagatgtccagcataaaagccaatatagtaaccatttttatctgttccagtaaggtagtacggatagcggaatccgacttgtcctccagcagttttatcgccatttaaaaatgcaccaacttttgcgtaagcaattccataaggatttacccactcaccattgagatgtaacaatttttgtgtaaaaccggcgcctacattccaggtagatgctttatgatctgctaattttgcttctggaagaaatgagtaatcttgagcatgtgcccaactgcttactgtcaaaactgcaagtaagggataaatttttctcattattttctccattttccctaatcgtatggtgagaacaaccctattctattgaatgagagactttaacagaattattttgcttcttatatacaagactctacaattttgttgtctacaaagtcaaaaaagccaatttgcctcttcactgaaactttgaaaaatatgcgatattttaagtgcgcttgcgttagaataagcagctatttttctcaccctatgtcattaagtcgatccgtatgaaacagcactttcctttaaaagatatccagcaagaaaagcgcatttatcgaggtcgtatattttttgccgtagggcttgtgattatctgtttattggtactagccagccgatacgcttatctacaaatttttcattatgatgagttctcgacagcatcggataaaaaccgtattcgcctacaaccccttccacctgctcgtggttatatttatgaccgcaatggggttttactggcagataactaccctgtttttactgcaacattaagtaaagcagatgttgagaacgttgataccgttattgaacaattacagcctattttagagctcactcaagaagatgtagatcgttttaaaagccgtattaaaacagcacgtaaaactgaacgtgtggccattaaactgaatttgactgagacaaatattgccaagtttagtgaagttaaatacaaatttcctggggttagaattgaaacccaaatgacgcgctattatccacatggtgatttatttgctcacgtgattggatatgttggccgtattaacgataaagaattaaaaagtattgataaagatttatacgctggaacaaacctgattggtaaaattggtgtagaaaaaagctatgaagatttacttcatggaacacctggttatgagtctgtagaagcagatgctcatagtaatattttgcgtcacctaggccgtaaagacccaacccgtggtaatgatctctacttatcattagattatggtttgcaagttgtcgcatcacaacagctcgcaggtcgacgtggtgcaattgttgcgatagacccacgcaccggtgaaattcttgcgttggtttcaagcccaagctttaatcctaacttatttgtgacgggtattaatcataaagattatagttctctacgtgacaatatagatcagcctctttataaccgtgcagtacaaggtgtataccctcctggttcaaccattaagccaatggaagcgatgggcggtttacattatggaattgttgattgggctactgctatttccgaccctggttatttccatttaccgggtgactcacacaaattccgtgactggaaaaaaaccggccatggcatcgtgaacatgcacaaagccattatcatgtcttgtgacacctatttttatattttggccaatcaaatgggcatcgatcagatgaaccaatggatgcgccaatttggctttggccaaaaaacaggtgtcgatttaccaagtgaaagtgaaggcttatatccaaatcctgaatggaaaatgcgtacacgcaaatccaaatggatgaaaggtgaaacgatttcagtcagtattggtcaaggtgcatttaccgcaactcctttacaactcgccatggcaactgccattacggcgaaccatggctcgcatgtagttccacatgttttacgtgcaacccatggtgcaaaaccttttaccgtacgtaatgcacctgatggaaaaattaatttcaatggtacagatgaagattgggtaaaaatgcgagaagccatgattgatgtaattcaatcaggtactggtcgtggcatccgtacaccgctctatcaaattgccggaaaaacaggtacagcacaggttaaaagtattgctcaaggtaaacgttataacgaagctgcgcttagtgaacgccaacttgaccacggtctttttgttggctttgctccggctgataaaccagaaatcgctattgcagttatttgggaaaatggccgtcatggtggttcagcagcccaacttgctaaacccgtgtttgattactggttattaacccgtaagaaaaatccgattcgaccagccaaccatcaggttaatggtggcttgatgaccgctggaattaaaccgggtgaactcccaagtggtaatgaaagtgccagctctactcctgcgacctctgctccgacttccgcagcagcctctactccacaggcaacaccaactcgtcctgctacaaacgaggtcgatgaataatgaaaaatcaattacgcattattgggggcgaatggaaaagacgagttttaccattcgccagtattgaaggattaagaccaactcccgatcgtgtccgcgaaactttatttaactggctcatgtgggacattcaaaaagctcatgttctcgatatctgtacaggttctggggcattaggctttgaagcattatcgcgcggtgctgcatctgtttatatgattgagccagataagacgcaggcacgatttttaaaagataatattcaattgctcaaagcgcagaattgccatttaattaatgcaactgctcaacaagctctaccacgcctaaaagaacagtttgatgtcgtttttttagaccctccttatagtcttaatttatggcaagaacttgcccacttagcagatatccatattaaaaataatgggtacatttatgttgaagctgaccgagatttatctcagcttcaccttcctgcaacatggcagcaagttaaaacaaccaaagctggtacagtccatgcagggctttaccaaaaagtaagcgaataaaaaggtagccttaagctacctttttcgctacaaagttttaaattaactcaaaccaatcactgcaacaagtgctgcacaggcacctacaatttttttgccatatggcacataacgtgtaaatactgcaccgagtgcaagcccaccacaatagataagtgccataccagcaaccataccagttactaacgccacgatatgccctgcatgtgctaactcaacaccatgagccataccatgaaagcttgcgagtaaagcggcagcgataggtaaaatccgatttgattttgtccatagcgcaatcgctgtaataattaaagaagcaacaataccgtattcagcaacattggcgggcaccaaaccttgagcacctaccaaaaagccgatcactaaggtgatacttaaagtgatgacaccagcgattttccactgtttggctgccgaccatagcaagacaccaaagcctaaagccattattaaatgatccaaccctgtaaacggatgaataaagcctgccataaaacctgaatgtacatggtcttgccccggatgagccatagctaacgcaggtaacatgctaaggagcccaacgctccattttttaatgaagttcatagttactccttaagccttaaacagcccttgcttctcaataaattgaataatttcttcaagcccatcttgtgttttcatgtttgaaaataaaaatggcttttcaccacgcatgcgttttgcatcttggtccatcacatcgaggtttgctcccaccattggtgcgaggtcagttttattaataatcagtaaatctgacttggtaatacccggtcctcctttacgagggatcttttcgccacctgctacatcaatgacatataaagttaaatcagaaagctctgggctaaatgttgctgctaaattatcaccaccgctttcaataataatgagttctaagccatcaaatttttcgcacagatcatcaatcgcagctaaattaattgaggcatcttcacgaattgctgtatgcgggcaaccacctgtctcgacacctacaatacgatctggtgacatcgcttcattacgggttaaaaagtttgagtcttctttggtataaatatcatttgtcaccactgccatattatatttatcacgcaaggcacggcataagttaagtgtaagtgctgttttacctgaaccgactggtccgccaattccgactcgtaatggactacgttctgtcataatttttatcctttttcctaaacttaagatctgaataaccgtgaatattgagtttcgtgtttcatgctcagcatggcatagcgcggcaaagcactactcaattgctcatctttaagttttaaagctttctctaccgcttgtggtactcgcccatgcaaatgccataaaattctttgtcctgccatttggcccaatgggacagtttttactgcggctaaaacctgattttctaaaacggtaaaggtatacgccgtaagtacatccacctctttaagttctaaacgaccgcaaagctgtgcatagacaggcacaaaaccaaactgctttttaacctcaactgttttctttaaaacatctttaatccatgcatttaaagaaaatgcgagttgctgagattcggccaaaagctctttactttctcggcttgccttatacaaatgtgcccaaattagaaactgatctgggtcatcataatgttgcataagacgtttaagtacaggcaactcaaagcgtactagcagcatttcaagcacttcttcaaagtaagcaattgccgaggattcatcgtgtattaagccaatatcaatggcggtttccacaccttgcgaatagcaatatgctccaactggtaatgccgtagaagacaatgtcagcagttgcagtaattgcgcagcattatgagtggacatggtgtaaaactttgattggacttaaacgatggtcatggctatgctgtgcataggcaccgctttcaggttcaaatggatgatcggtttctgtcacagtaagtcccaaaccttctaccatttctgcaagcacatgatcaggctcaaaatataaagctgttggtgtcagcattaatggcacatgtcggttacctaaatgataagccgctttaagcaaatcaaattcagtctgagcagtgactttcattagccgttcaggtttggcatcgacacgtaatacatccccttcttgcgttgcaatatatgaaccactacgcaaaatgccggtacgtggcaaatccgcaccaatatctacgccactcgctaaagccgctcgaaaacgtgatttttggcgggtatcaaacgttagctcaaccgtttcaaatgcctgatcaggagaaatatcttcaagacgttgggtgtaaattttcatttagcttttctctccttacttatttctttcatatataaggtaatgaggcaaatcacctctataaatttcattaaaacaagaaataacgctgtgccatcggtaatacgtcagcaggttcacacgttagtaattcaccatcggcccgcacctcgtaagtctcaggatgaacctgcataacaggacaatatgtattgtgtttcatatcggctttggtaattgaacgcgtgtttttacagggactgattaactttttaaggtttagcttctcagcaacttttttatcaattgcgacttgagataaaaaggtaatacaggtgttatgtacaccacgtggataagcaccaaacattgggcgataatgcactggttgaggtgtaggaattgaagcattaatgtcacccattggcgctgctgcaatcatgccacctttaatgatcatggaaggtttcacgccaaaaaacgcaggcttccataacactaaatcagcaagttttccgacttcaaccgaaccaatttcatggcttaaaccatgggtaattgccgggttaattgtatatttggcaatgtagcgtttaacgcgattgttatcatgaaactcattatcaccctctaatgggccacgttgtactttcattttgtgggcagtttgccaagttcgtaaaatcacttcacccacacgtcccattgcctgagagtcagatgacatcatggcaattgcgcctaagtcttgtaaaatatcttcagcagcaatggtttcacgacgaatacgactttctgcaaaagcaatatcttcagcaattgctgggtctaaatggtggcataccatgagcatatctaaatgctcatcaatggtattgatcgtgtaaggtcgtgttgggttggtcgaagatggcaagacattactttgcccaattgcttttaaaatatcgggagcatgcccgccgcccgcaccttcggtatggtacgtatgaatcgtacggtctttaaatgccgctagcgtttcttctaaaaaaccaccttcattcaatgtatccgtatgaattgcgacctgtacatcatactcatctgcaacgctcaaacagttatcaatagccgcaggtgttgaaccccaatcttcgtgtagttttaacccaattactcctgctttaatttgctcgctaatggggtcaggtaaacttaaattccctttacccaatagaccaatattcataggcaaatcatcaatcgcctgcaacatggtcgcaatatgccaaggccctggagtcactgtcgttgccgaagtacctgccgcaggtcctgtccccccccccaccattgtcgttgtcccagacatcagcgcggtttcaacttgctgaggacagatccagtgaatatgagtatcaataccaccagctgttaaaatttgtccttcacctgcaattacttctgtcgcagcacctaaaggaatggtaatgtcgggttgaatatcagggtttccagctttcccaattttccagattcgtccattctttaagcccacatcggctttaacaattccccaccaatccacaattaaagcattggttatgactgtatcggcaacttcatcagctagaagctgagattgtcccatcccgtcacgaataacttttccgccaccaaatttaacttcttcaccatatgtcgttaagtcttgctcaacttcaataaaaagcgctgtatcagccaaacgaatacgatcaccaaccgttggaccaaacatttctgcgtatgcacgacgtgacattttcataacttattactcatcttttcattattgttgttatctttaatccagcttgcccattacccgaccagcaaaaccatatacttctcgcttaccagctaaagcaacaagctctacttctcgactttgtcccggttcaaaacgtattgctgtgcctgctgcaatatttaaccgaaaacctttgactgcctcacgatcaaactgtaaggcatcgtttgcttcatagaaatgaaaatgcgaaccgacttgaataggcctgtcgccaagattagccaccacaacctttaaagtttctcgtccaacatttagttcaatatcagtttctggagtaataacttcaccgggaatcataagtattccttttatacaatgggctgatgaacagtgactaatttcgaaccatcaggaaaagttgcttcaacctgcacctcagcaatcatttccggtacgccatccatgacatcttcacgctttaataaagtcgttccaaagtgcataagttcactcaccgtcataccatcccgtgcaccttcaagtaaggctgcagaaataaatgcaacagcttccggatagttcaactttaagccgcgtgctttacgacgctcagccactaagcctgcagtaaaaatgagtaacttatctttttctgttggattgagttccatatctctttcctaaatagcatctaattttctttaagcaaaatgcgtgctcaaaagcagcataccggttttaatcgtttttaaaatacgcaatttaacgtaacttaagttttccaaattcttggaaattcttcatctaaatcaaaccaataacgtcttaatttagcccgtatagctgcgaaagcatcatgacatcgtcgtacatcatttcctaaaaaacgcgcacacagtacatcttctaataaggtcaacgtcacgggaacatccatacgcataatgagttcacggatgagttcaatatgttgctctaaataaaatgaagaacggaatttttcagggggcacggcccaaaaactggccatcaccgcttgattattcattcctaaacacgagcttaaccaacggtcgcctccctcaaaatataaagtatcggcaactaataacttgtttttgcgccataatttaaactggttgtgatagcttccctgaacaaaattctcagcccgagcctgccgccccaagaccaacatatcccatccaataaagcttgctgtttgttcaagatggatatctgtttctgagtgggctaaagcaccgtcaaaaagcattgtttcttgcggcatccactctaaaatagaatcatcttttacattcaaataaatatgctggaaagcatgttttccatttgttctataccacttacccgctcccggtgtggtaattacagcatgcgcctgcctttctgtttcaatttgaaaagtaagatgatcaccgcctgcaattccagccggtggatgaacaataatggcatgacaaaccccagttttttcgggccagagcattttttgcacccgaacggggccataatgctttctgtgactcattatggtgcgcgagttttcataacaaaaccccagttctaactgggcataccaaaatggtgctgaagaagtctgaaaagtttgttgaattcgattcattttggctcatttttgataatggcttttttgataagcaaaatatgcaccaaaagcaaaaagtggctattacaaacttagaaacaatttttttattttaatgagtcaaaaaatcatcaatgtctaacataaaaccacagtaaagcatggaattatttatacaatagcgcccattctcgctcttataaatttttcccatgaaaatctttttcgtgttagtaccgtttgtatttttaactgggtgtatttttggccaatcaagtgaggtcaaacgtgcagaaaaacttttaaataactttcaatgtaaaaatattgaaacaagtgaaatttctacaagttcaatcaactcttattaccagcaatctttagcggtgagtaaggaaaaagcgacctcttatgtagaaagctataaaaatggtgaagaattatttgcaatgcccttagatgaagtcgtagaacagcaataccaactttataaagcagcgtgcgattctttaggtggggtttctgcccaaccataaatttttaaaagtatccattaaatcactttagtggatacttttaattctcaactaaaatataaaaaaacatagccccaatctgtgcaatttttactcactttaccttttgttaaaattaaactacatactaaagcttttattttcgattcttttttcctagcctgtcagtactttatatttatttttttgaggttttattcattatgaaaaaatcattattagcaattgcacttatgagtacccttcttgtcgcatgtaataaacatgaaaataaaacagaaacaacctctgatgcatctactcctgtacaaactgctcaatcaaataataatgaagcggtagatacagcacatacagccgagaattctttagattgggatggtaaatataaaggtacgcttccttgcgcagactgtgaaggcatcaaaactgaattagaattaaaagatgataaaacttatgagctaacagaaacctatcttggtaaaggtgatgcaaacccatttgaaacccatggtaagtttactttcgataaagacaatacttctgttattaccttagatgataaagctcaaaaccgtaaattctttattggtgaaaataccgcgaccgctttagatatggaaggtaaaaaagttgaaggttctttagctgaacattatgttttgaaaaaagaagattaatctatttttcaatataaataaaaaacccgctcaaatgagcgggttttttatgaagtcaattcttagtgagctgagaattggttcattgtgtttttagcatcgtcaccagctttaagtgcattttcaccagcgaagatttctttgtggtcatcaccgatgtcagaaccagccattgcttggtgtttcacacatgcgataccgccacggatttctttacgttgtacgccagcaacataagctaacataccttggtcaccgaagtaaccttgtgctaattcatgagtagaaagagcagcagtgtggtatgtaggaagtgtgatcaagtgatggaacacaccagcttcacgcgcagcatctgcttggaaagtacggattttttcatcagcttcagcagctaattcagtattgtcgtactcagcgctcattaatttagcacggtcgtaagcagatacatctttaccttctgcaacccaacgatcgtacgcttgttgacggaagtttaaagtccagttgaatgatgggctgttgttataaacaagcttcgcattcggaactacttcttttacacggttaaccatgtgtgcaatttcttgtacgtttggagtcggagtttcgatccaaagtaagtcagcaccgttttgaaggctagtgatacagtcaagtacaacacggtcaatctgagtgccttcacggaattggtatagaccagaagctaaacgagttggacgatgtaatttaccatcacgtttaattaagatctcatcttcttgagcttctgagatatcaatttcttgagtatctaagtagctaatatatttagatgcgatatcacctggctctttaactacagggatcttctgagttaagtcagcgccttcagagtcagtacgagcaacgataacaccgtcttcaacacccatttctaagaatgcataacgaagtgcatggatcttagcgatgaagtcttcatgtggaacagttactttaccagcttggtgaccacattgttttgcatcagatacttggttttcgatttgaagcgcacaagcaccagcttcaatcattttcttagcaagtaagtaagttgcttcttcgttaccgaaaccagcatcgatgtctgcaataattggcacaacatgagtttcgaagttgtcgatttgagctgtgatttcagctactttcgcagagtcaccagcttcttttgctttatttaaagcacggaacaagtcatttaattcttttgcatcagcttgacgtaagaaagtgtagatttcttcgatcaaagcaggtactgaagttttctcgtgcatagattggtcaggaagtggaccaaattctgaacgaagagcagcaaccatccaaccagaaaggtagatataacgtttgcttgtcgtaccgaaatactttttgttagcaatcattttttgttgagcgatgaaaccatgccagcaacctaatgattgagtatatttgcttgaatcagcatcgtattcagccatatcacgacgcataatcgcagctgtatacttagcaatatctaaacctgttttgaaacggttttgaagttgcatacgagcagcatcttctgggctaatgtctgcccaagtgttgccgaattttgcttttaattcacgtactgcatcaatcgctgtttgatatgtagtcatgatattgtcctgtattcattttaggatttcatcgatcgaagcctagagtcatgttatgaaaattccctatgacaccagctgcttcttcatgtacacagcttagacttagccaatcaattaatccaatatccttcgttaatcttcagtatttatttaaaaaatataccaataaatcgatattataagtaaaactaaaaaacataacactttgtttataaaaacaaaataatcctaaaggagtatagaattttgattaaaaaacactccaagctttatttttatacagtttttgaaaattttccattcatttttaatataaaaagtcaattgtaaattaggcgaattttgccaatgcaaaatgtcaatcaatatgctagaacagtactaaatattaagaaaatatttttgttcaataattataaaaataaaaatagatcaacgataatagaatccagcatttgagatactttttgcccatacttaatttcaacaaaaaatgtcgtttttctcatcattttttcacacaatgttctttaaatatggcataatttgaaacaattttagggttttattttcggtattttttttatgaatctggagcgggtagatcttaatctattaatatatcttgatgttcttcttcgtgaaaaaaacgttactcgcgcagccgaacagcttggtgttactcagcctgccatgagtaatattttacgccgcttgcgtaatttatttaatgaccctctcctgatccgctcatctgaagggatgacaccgacagaacgtgcacttgaattacaaccgcgtattcgtgatgctctttccgacctttcaatgattttggaaccgcgtaccgaattccgcccttataccagtaatcgcgttttccgtattatgacttctgactatgcagaagccaccctagtccctcgtcttgttaaagccctccgctcagaagcaccaaacgttgtactcgattttcttactccaagtgatgtgtcatatagagacatggaacaaggtaaagttgatctagccattaaccgcttcaatgaaatcccgcaaagcttccatcaagttttggtttggcgtgatagctttagctgtattttaaatgacaaacaccctgctgtgactcatttaaatctaaaaagctatttagatgctcaacatatttgggtatctaaaacgggtatgggtgttggctttggggtaaacccagataaacaaggtggcttgggctggattgatcaagcattagaacgtattggtcaacgccgcaaaatttctgtatttacgcgtcactatcagatgccggcattacttgctcaaaatgttgacttgatcgctactcttccaactcgaatggcacgtttacaagcacaaaatccaaaattagttattaaagatccaccgttttacattcctgagtttgaacttaaaatggcttggtgtccattattgcaccatcacccagctcatcgctggttacgccaactcattctatttgttgctcgccaaatgatcgaagaggaaaatcgtgaattcctgactaataattcacaattttcccactattaaataagttttaatttaattgtctctttcaaacattatctttaagcgctgagcaatcaatctgattacctcagcgcttttttgtgttaaaacatagtcataataatgatgatcctcgggtgatttgtgagtctctttcaaaatatcattatcatcgtactgctcatcatcgcagcaggctttttatctttaactgaaattgctctagctggtgccagaaaagtaaagttaaagattttagccgaagctggcgaagaacgtgctcaaaaagtacttgatttacaagaacaatctgcagacttttttgcagcgtcccaaatcggcttaaatgctgttgcaatcttaggtggtatattgggtgaagctgcgtttcgtcctttttttgtgaacttagttgaccgtttctatgaaggaccttggacgcaaaccattggatttgccctatctttcacattggtaacttctttgtttattttattcgccgatttaatgccaaaacgcttggcaatgatcgcacctgaaaaaattgcaattagtgtaattaaccctattcagatttttatcaaaatctgtaagcctttagcatggggaattaatgcaattgccaatttgctattccgcttgtttaaagtaaataccacacgcgaagacaatattacttttgatgatatttcagcagtgatggatgcaggtgctcaagcaggtgtactacaaaaacaagaacatcactttattgaaaacgtatttgagcttgaagaacgtacagtcccatcaagtatgacaacacgtgaaaatgttgtttattttacgcttaacgagcatgaagatagcattcgccaaaaactggcagaatatccttattccaaatttctggtttgtaacgaaaatattgatcaagtgattggctatgtagatgctaaggatattcttgtacgtattttaaacaaccaatctttaacccagctcaatgaatcgactattcgtacggttctaatgatacctgatactttaacactatcagaattactcgatcgcttccgctcaacaaaagaaaagtttgctgttgtaattaatgagtatgcgcttgtcgttggggtaattacgctaagcgatatcatgattactgttatgggggattgggttacccctatggaagaagaacagcaaattattaaacgtgataataattcttggctgattgatggtagtacacctattgaagatcttaagcacgcgcttgaaatggatgaactacctgatgaagagaattatgaaacattagctggtttcatgatgtaccgtttacgcaaaatcccacgtccagccgactttgttgaatttggtggttataaatttgaagttgttgatgtagaccattttaaaattgatcagctattagtaacacgtgtattagaaaaaaatgatttaccttctccacctgatgaaaattgatttattttggtgcaaaatatcctgcaaatgcaggatatttttttttgataaataatttattccttttaagataattattatttttaaataattttatattaaaagttaaattaattatcctaatcacaatttcaaatatataaattaactcattcattaaaataaaaaaattaaattgaattaaaataaagttttgcacataaaagatttacagattcactttcgttatgtaacgtagggagtagaaactttgtaaatgggtatacttctcatttcagtattcaaacagaatataatttttaaaaatacatgataatttcaaacatgataaaggttttataagtatatataataagcactatacattataaatagattataccattattatatatgttcagtatttcttcaaaatatacctttccaagtgaatatatattaaccaaataaactaaatatattatttgtctttttaataaaaattcataagaataatcgaggtcagagtttttgaataaacttgttcagtaaaactaaaggcaaaggattgattgtatgctgacattacttggtgttggcatgattttatgcttcatgtatttaatcatgtccaaacgtttaagccctattattgctttaattctcatcccatttattttttctcttattgcctggggccttggtcactactttgaaagcttgagccatattgagcttaaaggtctcagtgaaatgatgttagatggcatcaaaaaacttgcgcctactggcgtaatgctattatttgcaattttatattttgccttaatgatcgatgcaggtcttttcgatcctccggttaaatggattttgaaaaaagttaaaggtgaccccctaaaaattacattagggaccgtttttttaactacattagtctctcttgatggcgatggctcaaccacttacatgatttgcgtggcagccatgctccctctttatcaacgcctcggtatgaatacactgatcatgacagcacttatgttgttatgtagtggtgtaatgaatctgaccccatggggtggtcctactgcccgtgcagcaagtgcgctccaagttgacccaagccatatctttgtaccaatgattcttccgatggtgattagtattggctggttattcttcttggcatatttatatggtcgctatgagcaaaaacgtttaggcgtgattgagcttgaaagtcaccatggtgacaacattacagtttcaaaagacccagaagcaactcgtccacatttacgtaaagtaaatatggtactcaccattcttcttatgattgcattgatcaaaggtattttaccgatgtcagtgttattcatgctggcgttctgtattgcaatgctcatcaactaccctgatgttgatatgcagaaaaagcgtatcgctatgcacgcagacagtatcttggctgttgtaggtttaatttttgcggcaggtatttttacaggtattttatctggtacaggcatggttgaagccatgtctaaagaatttgttgcaatgatccctacaagtatggggccatatctagcgccaattactgctctggtgagcatgccattgacgttctttatgtcaaatgatgcattcttctatggtgtattacctattcttgctgaagcagcttcacattatggtattagcccagaagcgattgctcgtgcatcaattgtaggtcagccagtgcatttgttatcacctctcgttccatcaacctacttgttatgtggtcttgctaaagtcgactttgcagaccatcaaaagttcacttttaagtgggcatttattacttgtatggtgttaatgggtacagctttagtgattggtgttttcccactttttagtacgatgtaatttgctctactataaaaataaaagcccctatcggggcttttattttttatttttattttttatttattatttattatttatttacatactcaatcatggcgtctaagaacgcatgaaagtgcaagctaatatcttcttgtaaaattttataggcattatcaaattgcaccattggaaagccttctttccaaaatgggaaaatattatgcaagtcatgagtaactattgcatcttctcggacaattgcttgtgaaatttgtgccaaaacttgcgctgtctctgcgccatcaacagcaagataatcaataccacgcgcttttaaaatacgaattcgatcttttttatagcgaatttttttagcttgagctgcatttaaacctagtgcaagagtaactgcctctacaaacttctcttcaaaatttgtatttagtgccaccaaagcctgcttatgtgcttcctgacgtcctgctttccccccgttacggatgatctcattggcttccgtatctagcttatcttttttcatcgactgtaaaatgtctaaaatttcgatatcgcttaaagattcaggagattgctcaaacataggagtctctatacatacaactaaaggcgtattctctcataaaagcgatactaaagcagagtaaaatttttaatagcatattatcttgactatttttatagtcctaatctcagagactacactcataaaatccgttaattctttggtcatgattttaccatttgccaaattaattttaccctgataatattattttaccctgataaaaatatgcggctaaaatgaatactaaaatcacctatactgctttcactggaagcacgcttattgcgagtgactcccttgttgaacttgcaaagaaactaaaagctcttcctaaaacaacagaaaatattctgatttttaatgatcaaacaggtcaacaaattgatcttgatctttctggttcagaacaagaacttcaacaacgttatgctgaaccggaagaaattaaaaaagttggacgacctaaacttggagtaatttcacgtgaaatcactttacagaaaaaacattgggattggttagatcagcaaagcgcgagtgcatcagcagtgattcgcaagttaattgataaagagttaaataacccaaattctgaaggcaatattatgctagccaaacaagctatcgaccgctttatgtctgctatgttaggcaatatgccaaattacgaggaagcaacacgcgccttatatcaaggtgatcgagatatatttttaaagatgattcagagctatcccaaagatgtaagggaatatttaactttaaaaactcaaaatattttctaaactcaataaaaaaacccgcttacgcgggtttttagaacttattttcaatctattaaagacgaactaattccacaattttctctactgcttcttcaatcgtttcagcagttacctctgtatctataccatccacagaagttgtgataatgacaacacccgtctcacgtaatagaaccaattgctcagctgttaagcttgttttcgcgatcgcaactacaccttgctgaatcagcaaactttctaaagcttgagctttttcaattaactgtgcagaaacaccaataacagcaggtttttgacctaaacgagcagcacgatcttcagcagtaacaggattactatgagccgtccactctaccgcggcttctaccatgcccgcgccaacagttacgttacttaaacggtcaataaaaataaatgaacctgtgtaacgtgaatcttgataacggtcaaacacgactggagcatcaaactcaaccacaacatctgcaatcgcatttaactcaagctcttctacttgagtgtgttcgagcgtattcacatttacacgatagttaatattagttacttttgctggaacagtttgtgtaccaatcttaatattgtacaacttaccttttacaagtgggtgttcattcatccataccactgaagcacgaacacttcttgaaattaatggttgctcgcctgcacgtactaagacattaccgcgactaatatcaatttcatcatttaacgttaaggtgactgcttgacccgcaactgcctgctcaaggttaccgtcaaaagtaacaatttccttaactgtagaacgcttaccagaaggcaacgccacaatctcgtcaccaactttaatttcacctaatgcaactgtacccgcaaagccacggaagtcgagatttggacggtttacatattgaacagggaaacggaattcatgtttacttgactcgcggttgatttccacagactcaagaatactcattaaggtttgccccttgtaccaaggagtatgagctgatggatttacaacgttatcgccatttaaagcagaaattggaacaaataaaatattggctggacggcgatcacccaattggctcacgaacgcatcatattcaacctgaatttcattaaaacgttcagatgaatattcaaccaagtccattttattaatggcaacaacaatatttttaattccaagcaaactcgcaataaacgtatgacgacgagtttgagtttgtacaccatagcgcgcatcgatcaggataattgcaagatcagcagtcgatgcacctgttgccatgttacgagtatattgttcatggcctggtgtatcagcaataataaacttacgcttttcagtcgaaaaatagcgataagcaacatcaatagtaataccctgctcacgctcagcctgcaaaccatctacaagtaatgccaagtccggtgcatcacctgttgtgcccactttcttactgtcacgtgttacagcttgcaattgatcttcataaatcaattttgaatcgtaaagtaaacgaccaattaaggtacttttaccatcatctacgttaccgcaagtcaaaaagcgtagaaggtctttttgttcatgttgttttaaatacgccagaatatcttggctgattaagtctgattgatgagacattgctcaaactccacaaatttagaaactgtcttagaaatagccttcttgctttttcttttccattgagcctgcttcatcatggtcaatcatacgaccttgacgctcagaacttgttgccaacagcatttcctgaataatttctggcaatgtatcagcttcagactcaactgcacctgttaatggataacagccaagcgtacggaaacgtacagacttcatttgcggaacttcaccctcttttaagcgcatacgttcatcatcaaccatgattagcgtaccactacgctcaaccacaggacgaacagcagagaaataaagaggaacaatttgaatattttctaaatagatatattgccagatatccaactctgtccagtttgataacgggaatacacgaatactttcgcctttgttcactttaccgttgtaaagattccaaagttcaggacgttggtttttaggatcccaacgatgtttactatcacggaatgaatacacacgctctttcgcacgtgatttttcttcgtcacggcgcgccccaccaaaagcagcatcgaactgatatttatccaaagcctgttttaaagcttgggttttcataatatccgtatatttcgaactgccatgatcaaatgggttgattcctgcttcacggccttctttattctgatgaacaattaaatcaaaaccatgtgtttttgccatgttatcgcgaaacgcgatcatgtctttaaacttccaacccgtatctacatgtaataaagggaaagggagttttgcaggataaaatgccttcaatgcaagatgaagcatcacagccgagtctttaccaattgagtaaagcatgactggattttcaaattctgcggctacttcacggataatatgaatactctcagcttcaagttgcttgagatgtgtaagtcttgattcagtcatgaacacgcccttctctatccattttgcccataaaatctagaagcggtattacaccaccacttagaagaccatgtggaggaacgagtgccataacaactccaatttttcgtgataaatagtccaaccacaagcctttatatggcttatagcattagttatgcattatagtgatttaaaaccgattccttttgcttgttttttcatattgatattcaaattcatcatatacatgtaatatgctgattcacttatacaactttgtaatcctagcttgtgtagtcgacttaagcaaatcatgttctagtctttagatttctttaaaaaccataaaaaaagagaagcctctgtagcctctctttcttattataaggttaactaaaaattagaaaccaaacattttacgctctagaggaatttccactccaattgatgcacccgcatcattaccttctaagtcagaatcacttacccaaccattaatttttaatggaagatcaggtttgatgtaatgtgtccaagttagatcaagcgctttaatttcatcatctttagggaatgctttattaattgccaagttagattggttaactttaaccaccatagcacgaccgcttaaacggttcatcacgtcaaagcggatatcaccacccacagaatacatttgtccatcgccacccatcgcatggcctaatgggaagccatgttggtaataaccatctttataaacataatgattataggaaatacccttcacatcattattagtgcgggtatcagcccattctgcataaagttgatatggcatattattatagctagaagaatagtcgactcctgctaaatacatttttttagaaggaagtagtccagcttcatcttcaccaacatattgaccataaataccaacaggagcatttataagagattgtagatttaaacgagcatcaaaacctgcgatttggttagaacgatcttcatcagaatcatacacattgtcattccctttaattgcattccacaaagaatcccaactttcagaacgtccttcaccaccccattgtaaagtacgagaagcacctagttctaaatagggtaaaggtcttgcagttaaacgtaagcctaataatttcgcatgaggaacagctttataatcatctaattggcctgcaaaagcttgatattgccaaggtccaatccaagataaccattttgtctcaaaagcattttgtacagctctttgtgccgtcacgccatacacaggacgacttgcatcgcctcggattaagctaccatcatgtccaggtccccaccatgttggaatttgacctgcaacaagccactggttccagagtttaccagcgacatatgaaccctcaacgttaacgtcatgcccactatcaatttgagggtctttttctgcgtttacacggatttttgcatcccaattttcaccaccagcattaaactctaatgaaccttggtactgcgatttttggttatcaccaaatgcttgaggaatatttttgatatcagtttcagcaaaagcacccactttaactgtatcgttatctgcctttaatgcattgagaactgaattaataactttttgctgtgctggatgagtcactttagcttgagagagagctctttgaatttcatcaccacttaatggccaagtagaagtgctgatgttaataacaccttgttgattcaaccagtttaagtcggtacgtaaatcatcattattaagcactaaaccttgtgcaaaaacagccgatgaagcagttgctaataatgcaatcgaaagtgtttttcttaaaaacatgtcagcacaattctcaaagttatttatgagcaacacattaatttttttatcgcaaatttgcaattgttaaactgtgcaattacattttttaacggtgttttaagttttctataacttaagtattttttatatataaatagttaataaaaaaggcagtataaactgcctttttctgtattgaagattaaattaaccttctttacgacgcatatgcgggaacaaaatcacatcacgaatacttggtgcatctgcaaaaagcataaccaaacggtcaataccaataccttcacccgctgttggaggtaaaccatattcaagtgcttcaacaaactctgcatcgtaatgcattgcttcatcatcaccagcatctttttcagcaacttgcgcttggaaacgttcagcttgatcaatcggatcatttaactcactaaagccgtttgccaattcacggccaccaataaagaactcaaaacgatcagtaatgtgcggattatcatcattacggcgagcaagtggagaagtctctgctgggtactcagtaataaaagtaggctgacgaagtttagtctcaaccgtttcttcaaatacgattgtttgaagcttacctaaaccaaaaccaggtttaacttcttcttttaattcctcacgaacaaattttgcaaggaattcacgatcgcctacattttcaggtgtgaactgcggattattctccaaaatcgcatcaaacatagagattttcttgaatggccctttaaagctaaacacttcgccttggtaaggcacatcagtcgtacctaaaatatcaattgctagcttttcaagcatgttttcagtcaaagccatcaagtctttataatcagcatatgcctgataaaactcgatcatggtaaattcagggttatgacgtgttgataccccttcattacggaagttacggttaatttcaaacacacgctcaaaaccaccaacaactaaacgttttaaataaagctctggtgcgatacgtaagaataatggcatatctaaagcattatgatgcgtctcaaacggacgtgcagacgcaccacccggaatcacatgcatcattggcgtttcaacttccatgaaacgttcattggttaaaaatgcgcgaatacctgcaacgactttggcacgaatttcaaaagtcttacgcgtttcttcattcacaattaagtcaagataacgcttacgatatttaacttctgtgtcgttcaaaccatgaaatttatccggcaatggacgaagcgattttgtaagaagttcaaaaccttcaaggtgtacatataagtcacctttgccagaacgaccgatataaccttcagcagcaataatatcgccaaggtctaaacctttaatagtttcaagcgtatcttttggtaaacctttacggtcaacatataattggatacgaccagtcatgtcttgaatcaccatgaaagaaccacggtttaacatgacacggccagcaacttttacataaacatgttcagcgctttcgatttgttctttagactgatctttaaattgttcttgtaaatcagcagcgtaatgttcacgtttgaatgtatttggccaaggactctttccagtttcctttgcaacatcttggatttgctttaatttggcatgacgctgtgcaattaaatcgttttcggaaatagttggttcagaagtcgattgagcgttttgttgcgtcatctctgcctcggttaagtaaaaatgaagtggcatagcttaacagattgctgaggtttttcgaacgatttcaatcaaacaaaaacgaaaaaagtccaagccgtcaatctgagtggacattgaatgataaaaattacttagaccaatcgctaagttcattttttttaggtttgagtaaaatataaaaaaatccaaataacctcgatttgaaaaggccctatttgccttttattttatctatgagattgtgtagtaaataatgaaaattctatttttacatggcttggattcttctcgtgaatcaacaaaatttcatgccattttacatcctgaaaaattttgtattgatgttgattatcgcaacctaagttatgcttcagttaaagacttttatcatcaagcgattgaaacaattaaacctgatttgttagtcggtcatagcctcggcggttattgggctttgaaaactgctgctcaacataaattagctgttattgttgccaacccaagccttacacctaattttcgtaatgattaccctcacctttgtgacgaagatcttgaccactctaaccctaaaatggcctatttagagttaggagacgagcaacttgatatgtatcaagtacaggaaaagctgtcaccatatatgacaatagaaacttatgacggaggccatcatcgtcttgcttatccttctcgtcttaatgatctcattactaaaattcataaaaaatattttgcttgaatttacgtatgacgcataattttcaaaaaacttattatataaaaagataacaaattgaattacagaaacttatttttcagccatttgttttacagcttcaaagccttgaacgaagccactttttaacataccgatatactcaggtaaggtggctaattctacttttaccgttgtagtatccccattttgacttaaaaaatatttttctagcgaaccactccagcttttcacctcttcactttccaagtcttctttcccgtctttaatcattcctaaatgtttaaaaattagtacttcaggctttttcatttcttcaatggtcgaaaccattccatttccttctccatctagaaaatatgttttaccaccgactttccaatctgtgcgcattgaagaatctggagcaaagaatttcgtccatgcattataggtctcactattccagagtacgtcccatactttttctataggagcattaatttctacttcatatattagagtttccatattcgaattcctttttctccgttaattaaatgttcaataaacttttctgttttatataaacattaatttatttgtccatttattaatcagattacttttttaagaactttatttatataaatgctttgctctttttgtaacccttcatatcactcatcgtttccttgcatgaataaactcttaaaaatatatgatttattatgtgtttatgttgaagttttgcctaaataaccatttatttgtctcgatatgccattcatctttgcttatgaatgattaaactcccttatatgctttactttaaatgtagaactgcgtaaaaatttgatatccgatcaaagcgacattagttattattgagcggatcgtagttacattattaatagatggaatagttttactgaaaggcagctttgagcaaacttatcagtgcggagagtctcatgaaaaaatatcaatgtatcgtttgtggatggatttacgatgaagcagaaggttggccacaagacggcattgcagctggaacaaaatgggaagatattcctgatgactggacttgccctgattgcggcgtttcaaaagctgacttcgaaatgatcgaaatctaatgtcttaaattaaaaggccatgatttacatggtcttttttatatatcaccaatcaccgttttaaattaacaattctaattctggagaaaaaaatgcatccaatcgtcattatcggatcaggcatggcgggttataccttagcacgtgaattccgtaagcttaacccagagcaagaacttgtgatgatttgtgcggatgatgcggtgaactatgcaaaaccaaccttatccaacgcttttgcaggaaaaaaagccccagaacagattccattaggtgatgctgcaaaaatgagtgcccaactcaatatgcgtattgaaccttttacttgggtgaaagaaattttagctgagcgtcatgaacttgttctagaaaaagacggcgttatttctcagcaatcctattcaaaattaattttagctgtcggtgctaacccgattcgccttgctattgctggtgatggtagtgatgacatccatgtggttaactcactcattgactatcgttctttccgagaaaatctagctcagcgcaaagataaacgtgttgtgattttgggtgcaggtttaattggttgtgaatttgccaatgacttacttcatagcgaatatgatgtaacagtaattgatttagcgcctcaaccattaggccgtttattaccttcacacattgcttcagcattccagcagaatcttgaagaagcgggtgttaaatttgccttaggcacaaccgttgaaaaagtaagtaaaatcaataatggtgaagattacgcagtcacattggcaaatggtcagactttggtcgctgatattgtgctttcagcgattggcttacagccgaatatttctctggctcaaagcgcaaatattcaaaccagccgtggtgtgattaccaatagtttgcttgaaaccaatcaagcagatatttatgcgattggcgactgtgcggaagttaacggtaccctacttccatatgtaatgccaattatgcaacaagcccgtgctctagcaaaaacattaagtggtcaacaaacaaatgtacattaccctgctatgccggttgcggtaaaaactccggctgcaccgcttacagttttaccggcacccgttgatgtggatgtaaattgggaaactgaagaattcgacgatggtatgcttgccaaagcaattgacaatgaaggaacattgcgtggtttcgtattgttaggtgcaacagcaggcaagcaacgtttaactttaactaagcttgttccagatcttattcctgcccaagcataaggtttaaattgggaatgctcatgatcttgagtattccttcaaggaatgaataacatgaatagcgccttacaatttagtatttcaccgtacactccatttatgcaggaaaccaaagtcaatttaggcaatggtatcgagctacatgtagaagtaggtggaaaaccagaacatccgactattttgctgattatgggtttaggtgcccaaatgctattttggccggactttttctgcaaatcactcattgatcaaggttttcatgttattcgttttgataaccgtgatattggcctttcttcaaaagtccgccatcaaggtaaacgtttaaataccatgaaattgatgggacgttttgctttagggctaagaaatcagggtgcaccttatacgctctatgatatggcagatgacgtttctatgcttctcgaccgtttaggagtaagcaaagcacatgtgattggtgcctcaatgggtggcatgattgcccagattctcgctgcaaaatatccggaaaaagtagaaaaattaggtttgatgtttaccagtaataatcaaccgtttctaccaccaccattccctaagcaacttttaagcttgattggcaagccagaatcacgtgatgaagaaggaattgtgaatcacagtttaaaattattccaattgattggttctcctggttatattaaccatattgaagccgttcaaactgcaagaaaactttatcaacgtagctactatcctgctggtgtacttcaacagtttttagcaatattatgtacaggttccttactgcaactggaccgtgaaattaagcaacccactttagtcttgcatggctctcgtgaccgcttacttccaccgagtcacggtaaggccgtagcaaaagcaatttccggtgctaagtttgaattaattgatggaatggggcatgatatccctgcccattttattccacagcttagcggtttatttgcgcatcattttaaatcatcatactaggacactatggctgcattaccctcactaagacagctatcatatttagttacgttgtcggaaactttgcattttactgaagcagcacgtcgctcttttgttacccaatcgactttatcgggcggcattatggagctggaaaggctactaggtggcgttctggttgagcgtgaccgtcagaatgtgcgtttaacgccattaggtgagcaagttgttgctcgagcccgtgtattgctagcagatgctcaggatttaatgcgtttaagccgtgaaatgagtgaaccattaacaggtgatcttcatttgggtgttattccaacaattgcaccttttatcctgacacggttacttgatgaagtgcatcaacaattaccgaagattcagttgcatttacatgaagctcaaagtgagaagattgtagagcgcctagaacatggtaatttggacatgattgtccttgccctaccttttgatacaagaagtttaaaagtagctgaaatttcaaaagaaaatttatatcttgtttgtagtaagcaagatacaaatgcacttcaagcaaattcacttgatgatctcgatttatcacgtctcattttgcttgaagaaggccactgtttacgtgaccacgtattaagcgcctgtccaattggtgagcgtaaaaacgataaccgcttaaaagcaagttctctaccaacattggttgaaatggtttcttccgatttaggctttactcttttaccagaaatcgcaattgaaaatagtatgatcaaatttaatgatcagattactgcaaaaccaattgaagacgcacctagccgtactttagcacttgttactcgtaaaagtacgccgttgcaaagtgagtttgatgttcttctgcaaatcatgcagaaaattaccacaaacttacatgaataaaaaaaggagtcttcggactcctttttattttactgtgctgttagagaagcccatttaaatacccaagccgatctcaaatccaagctatcatctgcaattattttttctcgaataatttgtgcaattgcgtagtcattggcagggtcgaccatgactcgtattccttttgtagttgcgctggtaacaactttataccctttagcctgtaattgggactgaatcatatttgctttattttgattaggtgccaaagcaacttgcaccatccattttttttcaccgttttctaaaatttctttcgcgaccgctgcatcaagttgctttttcttctcaatatttttcttttcttcaattttttttaactgattatcgtcaattttcttttgtgctaacaattcctcttgagtaagttttcttttctgaatcacgattgtcttatttggtgtgtcattcttcttatttttctctctagaaggatgtataaaataaggatatatcatttgatcatcaaatttctgaaatacaataatatctccatagcacttctgatccgcataagcagtcactggcattaaccccaaaaatattctaataaataaacttttaataaagtcttgcatattattcacttaccaaagttaagtatatttaatgcggcgtattaaagtagatttcttgtgatttgtatatttttaaaatccaatgttttatgtaaagaatcacatatttttcaaacatattgccttaattcaaattattgccgtttatcctacaaccatttagaaaaattaattaaattattatgaaattcagttaattaaaaagccgacatgatgtcggcttttttaaaaataattttttatttaaaagtttttaataattctctttgagcattatgcaatttttcgcctgcggcaggctgggcacgtacccatgtaccatcgccctgtaataaccaagcttgctgattatcttgtaaataattaaggagtccttgctgataaatacgttttttcaaagcaggatcttcaattgggaagcatgcttcaacacgattaaataagttacgatccatccagtccgcacttgaacagtaaatacgagcatcgccattattactaaagtaataaactcgagtatgttcaaggaaacggcctacaattgaacgtacccgaatgttttccgataaatttggtaatcccggacgtaaacagcaaatcgaacgaataatgagatctacctgcacccctgcttgagaagcttcatacaatttattaataagctgaacttcagttaaagcatttaccttgacaataatttgggctttacgaccagcctttgcattggcaatttcttcatcaataaagttgatgagctgagcatgcagagtaaaaggtgcatggagtaactttttcagttttgccattttacccatacccgtgagctcttggaaaatacggtgtacgtcttcacacaagtctttatcggtggtcattaggccgtaatctgtataaatgcgagcattcatagcatggtagttacccgttcctaaatgaacataacgcaccagtttgttgttttcacggcgcactaccataatcattttggcatgggttttataacccacaataccgtaaacaacgactgcccctgcttcttgtaaaacgttagccacttcgatattcgactcttcatcgaaacgggcacgtaattcaattaccgccgtcacttctttaccattacgcgcggcttctgctaaaacttgaacaatttccgagtctgcgccactacgataaagtgtctgtttaattgcgagtacttgcggatcacgtgctgcttcacggagtaactgaataacaggtgcaaaagactcaaatgggtgatgaagtaaaatatcctgcttttgcatagccgagaaaatactctcggtctttttaaatacttttggtacgactggcgtgtgtgaatcgtaacgcaaatgagggcgtttaaagttcgaaaccagacgagccaagtttacaggaccatcaactttatataattgttcttcgtttaagtcgaactcttcaagtagatattcataaatatgctgtggacaattttgggttacttctaagcgtactgcccgaccaaatcggcgtgaacttaactcaccttttaacgcttttgccaaatcttcaacgtcttcattaagtgccaaatcggcattacgagttacacggaattgatagcaaccagttgcagtcatgcccgggaacaagtctgaaacatgttcatgaataattgctgacaacatgacgtgatgttctttaccacccgttaactcatctggtaatcgtacaacacgtggcaatgaacgtggggctggtacaacagccaaatcaatttgtcgcccgaacgcatctttaccttctaaagtcacaataaagttaaggcttttattgactaaacgcgggaatggatgggctggatctaaactgattggagttaaaacaggcgcaacctgttcctgaaaatatttttttacccaagctgattgagctggtgttaattcaccacgacgtaaaaagcagatatcttcttcacgtaacttaggtaaaatttcttcgtttaaaatacgatattgacgctcaattgcagcatgagcagtttcagagattttttgtaagacttgtcttggcgttaaaccgtctgggcttcgactttcattgcctagagcgaattgctccataacacctgctacacgaatttcaaaaaactcatctaaattacgcgaaaaaatgagtaagaaattcattcgttccagtaatggatgtaaagggtcgacggcctgttccaatacgcgcaaatgaaagtcaagaatagacaattcacgattaatataacggtcattataactatattctgttggggtcgttgctgtaatcgctgtattcatgtctaacctaatctctttccaaccaaaatctctgcaaaatagtatgctgcaaaattatgtcaatttgataaaaactaaaaaaataacacatctttaagacagtgttattcaggaatctgggtgctattcatataacgtaaaataacgcgttttctatattgtagtttacgatcgttgcgatgatcttgataatatttcggatcaggcaataacgcggctaaaaaagcagcttgttcgcgagttaagcttttggcacttttgccataataatattgggccgctgcttcaacgccatacaaatttttgccaaattcaacagagttcatatacacctcaagaattcgacgtttcgaccacatgcgctccatcatccatgtcgctacagtttcttggcctttacgaataaatgaacgtttattatataagaacaagttttttgcaagttgttgagatacggtagaaccaccagcaacaacctctccttgctcattgttacgctctagcgcaaaacgaataccatcccagtcaaaaccatgatgatgaataaattttgcgtcctcccctgctaaaattgcatgtttgaaattgtcactaatatcatcatagtcaagccattcatgaatgatcggctcagatggatctgaccaataatcaattcgcataaacatggtggtatcaacttcatgtgtacgccaccaaaccaaacttgaaaagatccaaagctgaataaggagaattgccccaataaaaattaacaacacgcgaacaataaaggctttcatgttcgtcctgatctcctgtattcaacttttttcatgttaagctgtaaagcatgttcatatataacaaaagcatagcatgactcaatatcagcctccgcacattaatcgtaaactcaatgtacaagcttggtggctgaccgccctactgatctcgattaatgtaggtttgttcatctggcaaattatatctggagtggacattagtgacccagctataaaagatgcacttcactggggtgcagattttacaccacttactttttccgggcagccagaacgtctatttaccagcatgttttttcactttggtattattcaccttatgctcaacatgtgggctttatatatttttggtaatgtcgctgaagctttatttggacgtttatactttattggtctgtatttacttgcaggcttgtttggtagccttttgagtagttatattaatattcaaaatgggcatgaattattacaacattttgatcagagcttacttccccatgtcagtgctggtgcttcgggcgctgtgatgggattaggtgcagcattaactgttctttctttatttccgccgctgcctcatcaagcttatatacttgataagaaatcattattaatgattatggcgattaaccttatattcggtctggttgccacaggtattaataatgctgcacatgtcggtggtatgattatgggtgcattactcgcactgatttggtatttaagctaccgcactccatttaaaaccctcctaaaatttttaggtctattaggaggacttttaatgactgtgggcttctatgcttactgtaatcagcttaactcaccattacttccactttggcatgaggttttaattcagaacccagaaatactcccctaacttaaatttggttcagctcacgtaaactttgtagtggcggtaaattacaaagataaccgagtctatatcggccaatcagagcgcaaagcaacatcatagcaagtggtaaaatcaaccatatttcaatatgccactgtaaagccatattcattttataacttgcaatagcgctaattacctcggcaaaacagcaggcaacaatgcctgctaacaaacctaaaaaaccaatttccagactgagcatctgcttcattttatttttagagagaccaaatgaacgcaacaaagccacttctcgacggcgttcatccattaatagatttaaacaagcaattaaaacaagtattccagaaaagccaactaacgctgcaagcacagtcacgattttgactagaacattcattaagcgctttacttcatctaaaattcgatcaacatcaataaaaaccgtattggagaattgctgaatcatatggatcattttaggttgatcttgcttaggtacataaaaactgcccaagtagctaccagcattttcatctaaagttttaggtgaaaaaataaagaaaaaattaggactaaagctttcccactcaacgctccgaaaatttataactttagcttgcaagctaccttctggcagactaaaagtaagcctgtcaccaatctggattcctagactttctgctgttttactctcaactgaaacttggcctactgcattaaattccgcttgaccttttgtaatgacattgtcatttggtaaagcactcgactgcgttaaatttaattcgcggcgtaaagcattattttgctttatggcttcttctgaaaaaggtacatcattctttgcgagtaaccgcccacgaatgtttggatataatggtgtgctttgccaaccattttgctttaactgttgctcaaaggcttttaaatcaaatggtggtagaccataaacaaactggtttggtgttccctctggtaattgctgttgccaacgctctaataaatctgttcttaatacacttaacacggtaatgaggcttaaacccaaagccagtgctgtaatttgtaaggcactttgcgatgctgaacgaatataaaaagacaaacgggttttcatcttttttaaagcacggagcaatagccagacaacggtgtaaagtaaaatgcaaagcagaataatcgctgttagtacccaaatactgagcattaaattttcacttaaaactaagctaaaaataacaagactggtgatgcctgcaaaaaacataaagaataatgattttcgggattttgcctgttcccgaataacacggatgggaggagtatttaacaactcccaaatgcttggcaaaatgaatccaagtagcacaattacactggtaaaaatggcaattggtaagggaccaagtaaaaaaccaaccacagagaaacttaactctagttgtggaatcagttgtagcatgagctcaagcaagccatagcccatcattattcctaagagactaccgatcgcaatcgaaattgcactgactacacaaagtaacctgatataggcccataaaatttgaaacttactcgcacctaaacaacgtattaaagcaatgtgatcttggttttgctgaacatatctttgactcgttaaagcaatggcgataccacacaataaaattgttaaaatattggccaattgcaaaaaggtatctaggttttctaacggacgtaataatctgctatttgattcactggcatcgcgtaaacgtaaccctatggtttcttcctgttcatttgcaggttgatgctgttgcttaaattgccttgaaaatgactgaacctgttcaggctgaccagacattaacagtcgataatcgattctactaccagtttgaattgcatgagttttagcaatatctgcttgatgaataatgacagtaggcgaaaaaccagaaaaaccaagttcttgatttgaatctcgcacaatcacgccactaaagcgaaatgccgcatctgcaatagataccatatcgcctagtttaactttaagtaaatcggctgccctttgactcaaccatacttcacctggttggataccacgcgctataggttcaatctcaagctttcctcttaatgggaatgcaggttctattgcttttacattgaccatgacaaactgatcttgagtatgtgccattgaactaaacatggtcacattagtctgctttaagccaagctgatctgcccttttttgccattttgcgtctataggttcattattcgacagaaccaaatcggctgctaacatttgcgctgcttgtagacttaccgcatttttaacttggtcattactaaacttaagagcggtggttgcactgatcgcaagtgaaagcgcaataatgagtaaatataagcccccggtacgcaagctttgtagcaaaagtggtttgagaagattacgcataatttaaccaccctgtaccgtctttagtcggccatcatctaactcgacatgtcgttggcaaagtgctgccaaattacgatcatgtgtgaccaaaataagtgtagtaccaagctcccgatttaaatcaaaaagaagggtttcaatttcttgggcggtttgaccatcgaggtttccggtcggttcatcggcaaaaataatttgtggctcggcaatgagagcccgagcaattgccacacgttgttgctctccaccggataagaccttaggcgtttgttcagcttgacggcttaagcctacccgatgcaaccaatctaaagcttttttctcagcaattttataatcaaaatctttacgtaaccgaagcggtaacatcacattttcaagtgcacttaactgtggcaaaagctgaaaagactgaaatacaaaaccaatatgctgcattcgaatttgagcgcgctgctcttctgttaacttatgaaccgcctgaccacataaccacacctcaccttcaaagggttggtctaaagtcgctaaaatacccagtaaagttgattttcctgaaccagaacgtcctgtaattgctacctgctccccttcataaatatctaaatcaatattttttaaaatcgtaaattgattttggttaatctgaatagtttgtgtaacttgatgggcagcaatgataggttgtggcatgatgtgaacagtcctatatattgagtattcgggtcgaaacacaaatgtataaatcttatttgtttggttctaaaagtctcttgctcatctcattgagcatgttgcccatgttcgtctcggcaaaaactattttaattttaggagatagtattagtgccggttatggaatagaccctaaacaaggttgggtacaattactacaaaaacgtttagaccaacagtatcccaaacaacataaagtggtcaatgcaagtgtgagtggggaaaccactagtggcgctttggcacgattaccaaaacttttacaaacgtataaacccgaggtagttgttattgaattaggcgggaatgatggcttacgtggtcaaccaccacaaatgattcaaaaaaatctgtctcagctcattcaattaagccagaagcaaaaagccaaggttattctttttggtatgaagattccgcccaattatggcacggcttatagcaaagcattcgaaaatagctacaaaactgtaagtcaaaaatatcaggtgaaattgctaccgttttttcttgatggcgtcgctgggcaaaagcaactaatgcaaaatgacttgattcatccaaatacccaagcacaatcaaaattactgaatttagcttacccatacataaaaggtgccctataggcaccttttagtttcaaatttttctagactgattagaagtcaaaaaaagtaacttcaccagtttctagcgaatattcagcaccaacgacaatcagttcaccttttgcaattagattttctaatacagccgaaccatgacgtaattggtttaccgaagcaaatacgtttgaacgcaccgcatgacatgagagttttttcaagtcattttttaaatcagtctgcattaaaatctcaactgatggacgaacacggttcacaatcgacattaagttagaagatggcgggtgctcagggttcatcaacgtatcaatagtcgcttgaatcgcgccgcaatgactgtgtcctaatacaactacaaccggacagtcataacgttctgccgcgaactcaacactaccaacttgtgaaggtgcaacaacattaccagcaacacggattacgaataagtcaccaagaccttgatcgaataccatttctgctggtacacgagaatctgaacagcctaatacaattgcaaatggattttgatcctttgccatttcagcgcgttcatgatgtgataaggtttttgcaagggaagtatttccatttacaaatcgttgattacctgctttcaaacgatctaaaacttcttgcgcagtaggcattttatatttccattgttttttcaaggttagaaatcattttaatgtgtcaaaatttgaatgtcactgacaaaaaataaatcctttttcaggaaatttttttaaaattttaattaggtttataaggaagatcaccgcacaattgcctactgtttagtgaaaaaatagacatactttagtttatagattgactataattttcttgattccaaacgtttggcaaatgactcattggcaaagtttttcaataatttttcaaactcgcttaagcatcaaggatgaaatctatgacaaggctgtccgccccaattaaagcctctatgaaaaaaactgctactgcactgactttggcttgtagcttattgtcagtcatgagcatttctcaagcgcaggcagccgataatattgatgtcagctttcaaacaatattacagcaagaacgtaactgggcaggactgcaaagcaaaagcctaaaggtgggtgatatcacttggtcatatagtgaaggtggctctagcacaaagccaactttactactcattcatggcctagcgggcagtcgagataactggaaccgagttgcccattatctcacgacaaattatcacgttattattcctgacttaccgggcagtggcgaaactatcgtctcgcaagactttgattattcggttcccaacttagctgaaaaattacgtcgctttgttgaagccgccaatttaaaaggcccaattcatattgctgggcactcactcggcggatctattgccctactctatgctggacaatatccatttgaaaccaaaagtctatttttagtcgatagcggtggtattttccgttctgccaacacaatttatctaaaagatccaacctatctaaaacaacttttagtctctaaaaaaggtgattttaattatttattaaaacaaaccatgtttaatcctccgtttattcctaaagagttcctgcaagctcaagaaaaactgatgattaatcaagcacctcaaacccagaaactggttgatcaattgattgcactcaataaagtctataccccagattcctttgcggtacttactaaaacgattgacgcccctacactcattttatggggtaaacaggataaaattattaatgtagaagtagcaaacgagctaaaacggcttttaaaaaatgcccagcctccagttatcttagaaaacgtaggccatatgccaattttggaagctgaacagttggttatccaacaatacgtaccgtttttactgaaagtagaaacaaaccagtcgtcaaaaacgacaacaccttaaataaaacttccgatttgtgagaccttatgtctacccaacccattattgaaaaacttattgaagctcatctagattttttagatgagcagtttgctcaggctcaggtgatccaacaagagtttgagcagttttatcattggttggggagtcgacaattacaacacctttggacgtttgaacaggttcaacagctcattcaaaagcagattttagacacacccgcttcggattttcttattgaacagattgcggagcatatccgctttgcactgatccatcctgcaaatgacaccgcaactgttgaagacgttattcctgttttaaccattgatcgaattgcacaatatgttgccagtaaagaagagcaccgtaaaaaactcattaaaacaattgtgaataaccctgccttttcagcactgttgactcaattgattcagcaaacaatgcatgattatttagatgaatctatgtcaaaacgcgtgcctggtgtaggtcgttttatgaagatgggcaaatctgtattagaaacagtaaccgactctaatcttgacgataccattaaccattacttgcaaaagaatattttaaaactcagccagatgagtgagcgtgttttaaaccaacattttgacaatgataagctctaccattttcaggcaaatgtttggcataaagttaaaacctcgccactttctgttttaaaaaactatatagaagttcaagatttaacaaaaactgttggcctaggacatgaaatctgggaccacattcgtcaaactgattatctaaaacagcaagtacatgatggtatctatacttggtatgtacgtaatcaggaacgtaattttgatttgttgctccgtgatcttaatattgacgaaaatttagtgaagcatgaactcaccgaattgcttgtacccgtactacaacaattagtcacaacaggacatttaagacgtcgtgcccgtgtgtacttagagaagttttattattctgaaaaagcattagagattttaaataataaaggcgcttaaagcgcctttattattttattgattaaaaagaatattttaaagatgcgtaataagctcgacctggctcattataagtttggctaatagaattgctgtctcttaaaatttgtttatcaaacagattactcacaccaacacgcgtactaatttggtctgaaaacttataaccaacattaataccagcggtactataactttttaccgtacttggcttaagcgcagaattcgcacctcctgaacctataccggattcaagtctattctctgcaaattgacgtgatttttgacgaccatattgagtaaatacaaaatttacatccaattgatcagtaatgtcataatcaaaaattgagttaattgtatagattggaactaaagataatggattcccagtttgcttgtctttcgagtccatcatgtaggtaaagttattagtccagcgaatatcaccgaaatctaatcccaaacttccttcaaaaccttgaattaaggctttaggcgtattttcccaacgcaaaatattccacttcgtattggtcacagctcctgtatttgcatttgtacttgagccatcaactgttccaacaacatgagtacccgcaacaatcttatctttataatcattacggaaccaagttaagctcgcattcacgatatctttttggaactgaataccgagctctttgtttaccgatgtttcaggttttaaatcaccattaccttgtaataaacaacgcgactcaatattagcagggcagccattgccatttgtacttaataaatacccttcggcattttgatacatatttggtgctttataagcttttgctaccccaccttttaaagtgaaataatcattgagtttttgagtaatatttaagcttgggctccaattagaaccagatttactatggtcatcaaaacgtaaacctaatacaacatctgtgctgtctgtaactttcaggttatcttcaatatatgcagaagcaatacgtgactccattttactacgatcacctttcgctaattgatcgccataacctgaaccactgctgtctttaccttgagttgtcgagacattatctttaaatctgtcttcaacccattcggtacctacagttaatacttggggtaaatagtattcaaaaggaatattagcctcgccgttaaagcgaagagtttctaaacgcgaagtggctttatcatcaagattattaatttttccttctacacttcccgccaagccttcaggtagacgtttgttatgggtcttatcatattgagcaactaacttactcttaccccaagaccaatcaccttcgtgcgttaatgcatagctatcacgatacatggtattggtttctttaccaatcagctgtgaaagaatcgcatccgcttcagcatttgcatttaactgagagtcaccagaataaatattaccttgtttgctagaagaaatatcgagcaagacagtttgctggtctgttgcctgccaagctaaacggcctgaaatatctttatttttaacaccttcacggccagctgcggtactaccaattgatttattaatatcaacatcgtcagcttctgttttattataattaccatataaacgataagataaaacgtccttaattagtggcccacttacgttaaaaccaacacgatttgatgaaccttctttggagtcttcaggctgtgaagtatagaactctactgaaccatgagtttcattagtcacttttttagtaatgatgttaaccaccccacctgccgcaccagaaccatatcgagcagctgctggtccgcgtaaaacttcgattgactcgatggcttctgctggtacccagtttgagtcgcctcgtgtatcacgctctcctttccagccataacggactgaattacgagagttaattggcttaccatccactaaaataagcgtgttttcagggcccattccgcgaatatcaatttgtctattattaccacgctgcccagtagcactattgcctgtcaggttgacacctggcatacgacgtacatagtcagaaatatcattacgaactggtagtttttctaaatcttctttggtaataaccgatacaccgagcgattgcttcacttgctcttctgctgttacaaaaattgtttccaatttcacaggttcagcaggcttttctaatgtttgttcagcttgttcttgctcattttgtgcagcaaaagccatagacatcatacttgccagtactgaaacagaaagcactgactggataatacgcttcgacataagtattcccaatatattgatttattaaacatctctcattttcagtttcgcattgtaacaaagataaataaaattacaaatgatattgataataattatcattatttatattgtataataaaaaaacctcattccgaggcttttttatttcacttttcaaataatttaattatttgaaataagcaccttctgcttgtgtatggtctgtttggtcaaccacacgttgtagttcaggaatgtgttctttcaaagttgtttcaacaccttgttttaaagtcacatcaattgctgagcaaccttggcaaccgccaccaaatttcaatacagcagtaagaccatgttcagggtcatcttgcacttcaactaagctacagttaccgccgtgtcctgcaagacccgggttaatttctgcttgaagtacataggtaatacgctcttcaattgatgcatcaggccctacgcgcggcactttagagtttggagcacggaaagttaactgaccaccaaaacgatctttgttgtagtcaataactgcgtctaaaagataagggatagacggcgcatcaatatatgcagggaaatcaggatagtcctgtttgtaatccgtcggcaccacttcttctggtgcactatatgccatacagcactctgcacgtggtgtacccggatgttcaacaaaaattcgaacgccaattcccggagtattttgcttcgccaataattcgtgcaaatactcttgtgcagatggtgtaatcaaaaggttcggaatttcttctgcaacagcagtgttggtgttctcagtcgacataacaatattcctcaagctgatgcctttatattaaccgaagatgaggtggatttaaaaaaaatcaactaaatttgtcggatttatacacaacagggtttcaagttgtgtttttaatggcattattgccatcagtattgatcatttttaaatatttcttatgttgcatttgccgtttaatcacaccattactcttattattattacggtcattgtgtctttacttgcttttagcaatcaaaatgtcatgaaccgtttgatcttctggccgcctgcaatgcaacgtggacaatttgatcgattcattactcatggttttatccatgcagatggtacacatttgctctttaatatgattaccctgtttttctttggcagcatcatcgaaagtttttatcgccaatatttttatgacatgggttttgtgctgttctatttaggcggattaatttttgcgatcttgccaagctacctacaacataaaaatgatgcaaactgggcaagtctaggtgcttcaggagccgtatctgctgttctgtttgcgtatattttatttcagccgtggaagctgatttttgtatttttcatccctgtgccagctattatttttgcagttctctatgttgcttatagtatttgggcaggtaaacgtggtaatagtcatattaaccatagtgcacatttatggggggcagcttacggcgtaattgtaacgattttgattgagccaagagtgattcctcatttcttagatcaacttactcgcctacctttttaaatccatatttttgagaaaagcccaatatgggcttttctttttttctcatttatttatcaagataaattctcagatatttttctgattttctttgatcaattccttgttttgattgcaaaaaccatctgattaaactcaagcacaattcttttaataattcagatgatacaatgaagtacaaagctcttctatctagtctttccattgctttatttagcttatctttagctggatgtaacgataatgattcacaagaaactgcagtaagtacaccaaagcagccgaatattttattcattatggccgatgacttaggctattcagatttaggagcttttggtggcgaaattcataccccaaacattgatagtttagcgcaagaaggtcgaattttaactgactatcacactgcacctacatgctcgcctactcgttcacaactcatttctggtactgatcatcacttggcaggcataggtgctatggcagagcttacccctgatcatttaaaaggacagcctggctacgaaggctatttaaatgaacgctcactatcgattgctcaggtgctcaaagataatggttatcgaacttatattagcggtaaatggcatttgggattaacacctgaaaccaatgcacatgctaaaggttttgatcattcatttaccttattacaaggtttagaccaccactttaaacaagctccaagtgcgtttaagcgaaattcaacctataccgaagatggacaaattattcctatttcagcattgcctgatgactttttctcgaccaattattttaccgacaaattacttagctatttagagtcaggtaaaaatagtggcaaaccattttttgcctatgcagcctatacagcaccccactggcctatacaagcgccagcagaataccgtgaaaaatatcgtggcgtttatgacgttggttacgatgctatccgtaatgcccgtattgcacgccaaaagcaacttggaattattccagtaaattttgaggctgccgaaccaattgcgactcaaaatgctccacaaaaatatggcaagtggaatgagttaacagctgaacaaaaagcgcttgaagcacgcaaaatggaaatctacgcaggcatggtagaaaatctcgacgccaatgtaggccgaattattcaatatctcaaacaaaataatctttatgacaacactttaattttctttgtttctgataatggcgcagaaggttttgttcgcggaagctatggtagtgaatcaggctttgataattctgtagcaaatgtaggtacccctacttcttatcattacattggtccacgttgggccgaggtcagtgcagcacctttccatttatggaaagatacagctggtgaaggtgcaactaccgctcctgctattgtgaaattaccaaaccaaaagaaagctgaagaaaccaatcatagctttgcatcggtactcgacgtttttccaacattattagattatgctcatattccagtacctcaagggcaatataaaggccgaaccattaatacgccaagcggttattcttggaagtctgtacttgaaaataaatcacaaacgatacgccctgccaatttcagttttgctgatgaattgcatggtagtaaatatgcaaaacaaggcgaatggaaaattgcacttcaaggtcgccctgaattaggaacaggttcttgggagctctataacattgccactgatcgtggagaaaatcacaatgttgcgcagctataccctgcaaaagttcaagagctattagcggtttatcaaaaatacactgaacaaaatggcgtacaggaatataacgccaaatgaaattgaaattggttttaagtactacaatcggcctgttgttcatcacaggttgtagcaagtctgaacataacgctgacgctaaaacggttttaccaaagcatgccattcaatcggctgctttgggttccatcgaacagtgtaagagctatacaggacttcctacagactggcttaaaaatacaaccgcaggcatggtattcattccagatgggcattttaattttggttctgaaaaagcttatccagatgaacttaactttggaaaaaaacagcgggaagttaaaggtttctggattgatcaaactgaagtcactgttgctcagttcgcgagttttgtgaaggcaactggttatatcaccgatgctgaaaaacaaaaacaagctgctgttttttctccagacccccatcaccctcagcaatggtggcaacttaagacaggatatacatggaaaacaccaaacggcaaaaatggtgcacttcctaaccctcatgaacctgtacgctacgtaactaaaaatgatgctgaacattatgcagtttggctaggacgtgatttacccacagaacttgaatgggaatatgcagctaaagcaaactcaccaactgatactcctttacatcaagcacctaccgatgagcaccagcatccacaagcgaattactggcaaggtgcatttccctttgaaaatctgaaccaagatcattttactggtattgcgcctgtcggatgttttaaacctaacggttttaaactattcgatatgattggaaatgtttgggaatggacatcttctccttatcaaggtgcgcacgaccagcacatgggtaattattcggctttaaggcaacaagaaatgagcagtactcaatatgtgattaaaggtggatcgtttttatgtgctgaaaattactgttcacgttatcgtaatagtagccgctatccccaagattttgatttagccgccacccatgtgggttttagaacgattttacgctctccttaatttcttcttaatttagctgctaaaagatattttttaaccaaaaaccgatcgaaatataatcaaaacatttctatagtaaaagggagaatgataaaaaagcgagaacaacatgaaaacattacttctttgtgccgcagcaattttcacaatgtcattatcagcctgtgcagtacatacacctgagggtagtattgtgattgatcctgactctccatattacggacacccgggagatttttgcccacctggacaggcgaaaaaaggacgttgttagaagtactcttttaaagtcattagatagagacttctattaaacgatgaactgaatacctaaatggagggttccagcccaaaattagatgggatgaaactagaaaattatggtgtaaaaaatcaccatatccccaagatttttaaaagacaatcttacgttgtcttctatctagtttcaccccaattctttcttatttcgtttgacttttctgatcatttaataaaaaagtctagtttttactcatcgttgtatctttttattgatacattttgatcattttaccttcaggtcaaacctgatgaattcgctctatacaaaataactatttatgtaacgtaagtctataaaaatgttctaaaaatgtgaaaaaaaatgaaggtaaaatgcgatgtaattatcataaaaaatgactcatcttatattcatcacaaaaatattgaattttattttggcagttattgccacacgtttcttttcgttggcatagataatgtatacacctgtatattaaccttatcgtacaagcgagatattttatgtccagccagagtccagccgaaggtctacaatttccgattcacgcctcgataaaaaagcaaagcacgtctcttacaggccaagagattttgtcagaagctttatctattgtagataataaaactgctcaacagattttggctgaaaaaaattggcgaaaaaattatcctatttactttaaggcacttgttaagcacggaattactaacagcaataatccaattaccattgcaaaacagggattgcataaggctcatcatctttttgattattaccgcgatggtaaacactatcttttaaaagatgctctacacatccccacttctacacctttaaatacagtaaaatttaaaggcgaaagtgaagctgcaccagaatggtatgttccatataaaggtcaaaaactgagcgggcaaagcttacttgaccaaattcaaaaatgggaaaatgcaggtattattgaaccaagccatgctaaggctttacgcgaagctgctgctcatcctgaatggtttgatttatctgaccgtacgatggtgttatttggtgcagcctcagaagcaggaccattaccttggctagcaagatggaaagcgaatattgttgcaatagatttaccaaacccacgagtttgggggaaaattctaaatacaatccagcaaggaaacgcaacgcttattgcaccaagtattgaaaaaattgactcttcggcaaaagcttcagcattgagagataaattgggtgctaatttattaacgcaaataccagaaattgcccaatggttagttcaatttcctcaaaaattagacttggctgctattgcttatttagacggagaaaaacatgtccgtgtttctatggcaatggacagtattatgcaatatgtgagtgaacataaacctgataccagcttaatgtttatgtgcacaccaaccgatgtttatgcagtaccaaaagaagttgcagaagctgctcaagagaaatttaaatctcgttcacaactacaaaaaatggctgtgaaaggtgtttctacactctcactcaaacgtttttttcaagcaccttatcaagatttgattactagcgaaaatggcaaaacttatggtattgcagactgtttggtagttgaacaagggccaaactacgctttggcaaaacgtattcaacaatggcgtgcgacacttgcccgtcatcaaggtcaacgtgtaagtattaatattgcaccatctaccacaactcattcggtcacaaagaatccactccttaaagctgcttttaatggcgcagaactttttgatgtagaagcatttagtccagaaaccacgaatgccattatggcagcgttatggattcatgacttaagaaatgattcttctgttgcaaaccctgaaaccgtactcgaccaccctctagagttgatgatggaaggtgccaatcatggtggtctatggcgtgtggcttatttggcccgtacagctcttccttttgctgccatctatggctttgcagccgagaaacttccatttaggaaattttctaaaaaataataacgttgaaagcccaattttagaattgggcttttttgtgcaattaattgcgttggctatacgttaaatacttttgcatttcatcaggtggaaccattcctcctcctgtcgcccataccacatgtgtcgcatgctgtaacttttcagctgacaattgatgcaaagccaaataatcaggagtagtttgcacataatatggccccatcatgcccgccgccgccgagggttcaacttgaatattctcagtttgatttaaaagcgcaatgagttcatataaacattcatcatgaatggtgtagtaaccgtcaattaactgctgcatagcacgtccgacaaaaccagaagcacggccaacagctaatccatctgccgcagtgatgttatctaaaccaatgtcatttactgaaatctgatcatgcaggcctgtataaacgccaagtaacatacatggagagtgagtcggttctgcgaatatacaatgtacatgctcaccaaaagcgagttttaacccaaagctcaccccaccaggtccgccccctactccgcatggcaaatatacaaataaaggatgatctgcatcgactttaatttgcttttgttcaaactgttgttttaaacgcaaacctgcaactgcataacctaaaaataaagtagtcgaattctcatcatcaataaaaaaacaaaatgggtcctgttcggctgccttacgtccttcttctacagcaactccgtaatcactggcatattccaccacatttacaccaagtgaacgtagcttatctttcttccattgccttgcatcggcagacatatgtaccgacactctaaacccaagcttcgcgctcataataccgattgataaaccaaggttaccggtagaacctactgcaatttgatatttggaaaaaaatgttcgaaatgagtcttggtctaatttactgtaatcatcttctagcttgagaagccctgcctcaatggctaatttttcagcatgggccaatacttcataaataccgccacgtgccttgattgaacccgaaataggtaaatggctatcttttttcagccaaagtttccctgtaagtgtcttatgcttttgtagcgatagagcttgttgcatctccgcaatttctactagtgctgattcaatttttccatgctgggcttgagtttcaggaaagacttttgccaaataaggtgcgaaacgcgctagccttgcttctgcttcttttacatcctgttctgtaagacacactttcgctagtgcttcgtttaaaggataacggtgagggttaaaccaaaatgtttcttgataggcttgaagtgtttcaataagtggaaattgttgttttaactgatctatttgaaccgcattcataatatatcctgatataaaagtttaagcccaacctataaagctgttttgatggcctataacaacttattaatttatagatgaatgtacatgaaaaatagtctcaactttaaaaactaaacaaataaaaaagccactgtgaacagtggctttaattttttaaatgcttttatacaaactgtaagaataaccagtacaaaccacccgacaaacagatggttgcaggaagtgtaaatacccatgcagagagaattgtttttacagtattgaaattcaggcctgatttattggcaaccatagtacctgcaacagcgctgtttaaaacgtgtgttgttgaaaccggcatacctaaaccatctgctgcagcaattgtactcattgcaacaagctcagcagacatcccttgaccataagtcatgtgatgcttaccaatacgctcaccgacagttaccacaatacgtttccagccaaccatagtaccaagtccaagcgctaatgcgaccgccactttcacccagtttggaatgtattgtaagaatgaatccaagctactacgataatctttcacaagctttttctgtgagtcatccatttttggtaaagcatctgccttatccaaacgcttaaacgtcgttgtgctcaaatacatgtcattacggatttcgctaattgcagcttctggaatatcttttaagttgctatagctagaaacacgctcacccaaatggtcagtcatgcttgccaatgcaggcacaacttcaggcgtttgttgcttggtttgaatgtatttagttaaaaccgcacgcgctttttcgtcagtcaattctggttgattttggtttaacaaaaccgcagtttgagaagaaagctgatggaatgattgaacctgctgtgtatcgaggtttttatttaatgaataagctaatggcaccaaaccaaccaaaatcagcatgataagacccatacctttttggccatcattagaaccatgtgcaaaactcacacctgtacaggtaaagataagaattgcgcgaatgattgctggtggtggcttatttccttcaggtggctggaataattctaattggcgtttgaaaatagttttaaccaacaagaatacaattgccgcaaaagcaaaaccaattaaaggagaaaataataatgccttacctactttaatcacctgatccatatcaacaccactggtcgttacgccagtcgatgcactcaacagatgattcataatacccacacctaagattgaaccaatcaaggtatgagagctagaagcaggaattcccaagaaccaagtaccaagattccaaagaattgcagcgatcaacaatgcaaaaaccattgcaaagccagcaccactgcccatgttcataataagttcaactggaagcaatgcaataatgccatacgcaacagcaccacttgcgaccattaccccaaggaaattacaaaaacctgcccacatgactgcaaccggtgcaggcaaagcatttgtataaataaccgttgcaactgcattagcagtgtcatggaaaccgtttacaaattcaaagcctagtgcaatcaagagtgcagtagataaaagaataactgaataaaggcttaaaggtggaacatgcgctaaatcagcactgacctgaaacccaatataaataagtgttgcaataataatcgtcagaaacaccggcataaaaaacttaggtgtcgggacatgtacattcgtcgattttgcttgcaggtttgccgcaagttttgaatccgaaacagggggtagattagaattcatgcagacggtaagaggataataaaatcctctgtattcttaaattaaattatgacaattatatgacaaagaggcgcctgatgaagtcaattttttatattttgacctcatttgatgcacctttccccgactgtttttatttttttattaaaatacaataatttaaaccattaattatgagctccttttgtgcttatttttacagcaaaaaataaataaaattaccgatatgtctatttttcatacaaagcaactgtaatatttcggcatattgagcatgaaatatttcaatatcatgatcatttgatgaatatttcatgaaaattcttttgtttttgacataaagcgatctcttttttaactttttagtcagctacacctgaccttcgtagatcatcatttgtgctgctattctgttacaatagcgccgcatttttaaattcatataaagatcggggttttctatgtctacgcttgccaccctaaaagcgcttcttgctaaacgcattctgattattgatggtgcaatgggaaccatgatccagcgccataaattggaagaagctgactatcgtggtgagcgttttgctgattgggcacatgacttaaaaggtaacaatgaccttttggttctaacacagcctcaaatcattcaaggtattcatgaagcctacctcgatgctggtgcagacattattgaaaccaacagctttaacggtacacgtgtttcaatgtctgactatcacatggaagatcttgttccagagattaaccgtgaagcagcacgtttagctaaagcagcttgcgaaaagtattcaacgccagacaagcctcgttttgtggcaggtgtacttgggccaacatctcgtacatgttcaatctctccagatgtgaacaaccctgcttttcgtaacattagctttgatgaactaaaagaaaattatattgaagcgactcatgcactaattgaaggtggtgcagacattatcctgatcgaaactgtatttgatactttaaactgtaaagcagcgatttttgcagtcaaagaagtctttaaacaaattggtcgcgaattaccaattatgatttcagggaccattaccgatgcatcaggccgtactttaacaggtcagacagcggaagctttctggaactcggttcgtcatggcgatttgctttcaatcggttttaactgtgcccttggtgcagatgccatgcgccctcacgtaaaaactatttccgatgtcgcagatacctttgtttcagcgcacccaaatgcaggcttaccaaacgcatttggtgaatatgacgaaactccagagcaaactgcagctttcttaaaagagtttgctgaaagcggtttgattaacattactggtggttgctgtggtacgacaccagaccatattcgagctattgccaatgcggtaaaagacattgcgcctcgccaagtgcctgaaaccgtacctgcttgccgcttaagtggtttagaaccatttaatatttatgatgattcattgttcgtaaacgttggggagcgtactaacgttaccggttctaaaaaattcttacgtctcattcgtgaagaaaactttgcagaagctttagaagttgcacagcagcaggttgaagctggcgcacagattatcgacattaacatggatgaagggatgctcgattcgcaaaatgcgatggtgcatttcttaaaccttgtagcatccgaaccggacatttcacgtgtaccgatcatgattgactcatcgaaatgggaaatcattgaagccggcttaaaatgcgtacaaggtaaaccggttgttaactcaatttccttaaaagaaggttatgacgagtttgttgaaaaggcccgcctctgccgtcaatatggtgctgcaattattgtgatggcctttgacgaagtaggtcaggccgacactgctgaacgtaaacgtgaaatctgtaagcgctcttatgacattttggttaacgaagtaggcttccctgctgaagatattatttttgacccgaacgtgtttgcagttgcgactggtattgaagaacataacaactacgcagtcgattttattgaagcaacgggctggattaaacagaacttaccgcacgccatgatttctggtggtgtgtctaacgtttcgttctcattccgtggcaatgaaccagttcgtgaggccattcactctgtattcttgtaccatgccatcaagcaaggcatgaccatgggtattgtgaacgcaggtcaaatggctatttatgatgatattcctaccgagctaaaagaagcggttgaagatgtcattttaaaccaaaatcaaggtgagtctggtcaagtcgcgactgagaaactacttgaagttgcagaaaaataccgtggacaaggtggtgcaacaaaagaagccgagaaccttgaatggcgtaatgagtcagttgaaaaacgtcttgaatatgccttggttaaaggtattacgacttatattgaccaagacaccgaagaagcccgcttaaaatcaaaacgtcctttagatgtaattgaagggccactgatggacggcatgaacgtcgtcggtgacttgttcggttcaggcaaaatgttcttgccacaagttgtaaaatctgcccgagtcatgaaacaagcagtagcatggctcaacccgtacatcgaagctgaaaagaccgaaggacagtctaaaggtaaagtcctaatggcaacggttaaaggtgacgtacacgatattggtaaaaatattgtaggcgtagtacttggctgtaatggctatgacattgttgaccttggcgtaatggtcccttgcgagaaaatcttacaaactgcaattgatgaaaaatgtgacatcattggactgtctggtctgatcaccccatctttagatgaaatggtatttgttgctaaagaaatgcagcgtaaaggctttaacattcctttattaattggtggcgcgactacttctaaagcacatacagcagtaaaaattgaccctcagtatcaaaacgatgcggtaatttatgttgccgatgcttcacgtgctgttggtgtagcgacaaccttgctttcgaaagaaatgcgtggagcatttattgaagagcatcgtgctgaatatgccaaaattcgtgagcgtttagccaacaaacaaccaaaagcagccaaactgacttataaagagtcggttgaaaatggttttaaaattgatgaaagctacgtgccaccaaaaccaaatcttttgggaacacaagttttaaagaattatccgcttgctacactcgtggattattttgactggacgccattctttatttcttggagtttaactggcaaattcccgaaaattttagaagatgaagtggtcggcgaagcagcaactgacctttacaaccaggcacaagcgatgttgaaagatattatcgacaacaatcgttttgatgctcgtgctgtatttggtatgttccctgctcagcgtacagatgcagataccgtcagcgtatttgatgaagctggtcaaaatgttacgcatacttttgagcacttacgccagcaatctgacaaggtgacaggcaaaccaaatttatccttggcagattacattcgagctgatcgcgagcagcaagactacttgggcggattcactgtatcgatttttggtgcagaagaactggcaaatgaatacaaagccaaaggtgatgactactctgcaattttagtgcagtcattagctgaccgttttgccgaagcttttgccgaacacttacatgaacgtattcgtaaagagttctggggctataaagctgatgagcagctcagcaatgaagaactgattaaagagaaatatgtcggtattcgccctgcaccaggctaccctgcttgcccagagcactctgaaaaagcagtgttgttcgactggttaggttctaccgacaaaatcggcaccaaactgactgagcactttgcaatgatgccgccatcttcagtaagtggtttctattattctcatcctcagagtgaatactttaacgtgggtaaaatctctcaagaccaacttgaagattatgcaaaacgtaaaggttggacactggatgaagcgaagcgttggttagctccgaatttagatgactcgattgtttaagttcttaaataaccctgtttaaaaatagggcgtgaaggaattccccatcacgcccttttcaatttgaaagtttaatctttctacttcaaatgtgccttaatcttctctttaactgcttcagttgaaataccatatcgatcatgcaaagtgggtaatgcgcctgcatctaaaaatgcatctggcaaaccaatcatatcaaaacgaggatgttgaccatttcttaaaagtagtgagccgacagcttctcctaacccaccaatgactgaatgattttcggcagttaaaacaggtcggccaccttttgcgacttcatccaaaatagtttgttcatctaaaggcttaatggtaggcacatgcagcactgaaacctcaatgccctctttttcaagttcttcagctgcctcaagcgcacgcatggtcaataaaccagtcgaaataatgagtaaatctttacccggtttaatcacctgtgccttacccaatttaaactggtaattatatttatcgagcactaacggaacttgtccacgcaataaacgcatatatacggggccattatgcgcggcaatctgaggaatcgcctgttcgatttctaaggcgtcacatggatcgataaccatcaagttcggcatagcacggaaaattgcaatatcatctgttgcctgatgacttgggccataacccgtggttaaccccggaagtgccgccacaattttgacgttcaggttatcctctgcaattgccatacaaataaagtcataggcacggcgtgatgcaaacacggcataggtcgtcgcaaaaggaacaaatccttcacgagcaagtcctgctgctgcgctcatcaaaagttgttctgccatgcccatttggaaaaacttgtctgggttttcttttgcaaaaatatgtaggtctgtatattttgacaaatcggctgataaacctacgatatcgtcacgatcttttgtcaaggaattgagtgcatgtccaaatggagctggtttggtcggttggccctccgcagcaatagaagcaatcattgccgaagtggttagttttttcttaggaggattagctaactggctcatggtatactccttactgtccgtagtgggtcaaaatatttaaagcgtcgtcccattcatgttcatcaacacgaatgaaatgtgttttttcgcggctttccaagaacgacacgcctttacccattttggtgtcacaaataatgactcttgggcatgctccctcatagtttcgtgcctgatcgaatgcctcaagcagagcttccatgttgttgccatctacacgctgggtgtaccaaccaaatgactgccaacgatcaacaattggctcaaatgctaaaatttcgctggagtgcccatctgcctgctgattattcacatcaataatggcaatcaagttatctagtttccaatgcgaagcagacatcactgcctcccatgttgagccttcatttaactctccatcagaaagtaagttatagacaaaagcatctgattttttctgtttcagccctagacatgcaccgactgcaattccaagaccatgacccaatgagccacctgtaatttccatacccggtgtgtaagaagccatacccgacatcggtagacgactgtcatctgcaccgtaggtttcaagttcttcaagcgggataatttttgcttcgattaaggctgcatagagtgcaattgcatagtgtccaatagaaagataaaaacggtcacggccttcccattcagggttttcaggctgatatttcatggcatggaaataagatactgccagtagatctgctgcacctaaagcttgtccaacatagccttggccttgtacttgccccatgcgtaaagcatgttggcgaatgtggtaggcacgttgttgcaactcggcaatttggcctactttatcaacatttaacattgtcttttactattccttattaacgattgaccagttttgccggaacacgcagaaccagactggcaccgaaaattaatactgctgtgattaagaacatgccgattgcatttgaacccgtgttagtagtgacccaaccgattaaataaggtgagcaaaatccggcaaggttggcaaagctattgacggctgcaatacctgccgcagcggaaacaccacccaaaaagttggtcggtaacatccagaacaaagaggatgctgtcagcacacctgaggctgcgatgcaaaggcaaattaaagagagcgttagatttgaagcgaataaagtcgcaaatgtgagtgctatagcacctgcacacatcggaataattaagtgccagcggcgttcttggaaatggtcgccgctacgccccgccaaaatcatgaccacaatggcacacatataaggcaggcttgtgagcaaaccaatatgccagttatcactaatgcccgagttacgaatgagagttggcaaccaaaatgtaattgcgtattggcccatcactacacaaaagtagatacctgcgagtagccataaacgtttatctgcgatgaactctttgacgctagcatgaccttctttgtgctggttatcctgagcaagctcttgcttcaccaagttcttttcgtcttgggttaaccagttggcgtcttgaactgaatcttttaaaacagctagtacaagtaagccgacaatcactgtgggaatagcttcgatcacaaacatccactgccagccaaaccaaccatgtacaccgctcattcggtccatgattaagcctgaaagtgggccaccaatcattcccgaaattggaattgcgataaaccaaagtacggtcatgcgtgcacggcggtaagacgggaaccagtaagtgaggtagagcaacaaacccggagctagtccagcttcagcgacacccagtaaaaaacgtaaggtgtaaaattgccattcggtttgaacaaaggcaaaacagcctgacaaaatgccccatgtaatcatgatacgggcaatccaacgtcttgcgcctaccttgtgaagtacaatgttacttggtacttcacaaagaaaataaccaataaagaaaatccctgcgcctagcccatatacagcttcactaaactgtaaatcgctcatcatttggagcttggcaaaacccacatttacccgatctaaataggcacaaaaataacaaagcattaaaaatggcatgagccgaaatgcaatttttcgatacgccgatttacgaaccgttgtatctacttcagatgaaaatactgtatccatcatgcgaatccctttacatttggccacagtatcctcttgtgaccatcattctatttttatttaaatggtgagcgtttaatgaataagcatgccaccatttacatcgagtgttacaccagtcaaataagctgacaggtcacttgccaaaaatagtgctgcatttgcaacgtcttgtgctttacctaaacggcccagcggaataccagccagaatgtcgtgacgacggtcatcattcattaaaccgccagtaatatcagtctgaattagaccgggagtaagagaatttacacgaatctggtcaccaccaaactcacgagccatcgcttttgccagacctaacacgcctgctttagcagcgctatagtgtggcccgccaaaaataccaccgccgcgttgtgctgaaactgaagataggcacacaatgcttccaccaccgtttgctttcatagatggaataacagcttgtgacataatcagtgttccgcgcaggctgacatctaaaatacggtcatagtcattgcgctgaatatcgagggttttaactggctgagtaatgcccgcattgttaattaaaatatcaatcttgccatagtgctgtagtgcttgttcaacagctgctttgacctgttcttcatttgcaacatttgcagcaagtcctaaatgaccgtcaccaagcgcctttgcagcgttttggctttgagcaagatctaaatcaacaataatgactttggcaccctgttgtgcaaagatttctgcggttgctcgcccaattccacgttctgatgctgcaccagtaattaatgccacttttccttgtagtaacatgttgaatcctcttttacgctttatttcctgagttctgacttagaatcccttttttcacaaagcccagcaatcatgtcgaattcaactaggcatgaaaaaaattcatgtctatgctattttcaaataagttttagggataaaaacggattatttcatggacagtagtgaaaacaatttcaatcagatgccctctattaaaacattacaggcttttgagcaaactgcccgttttggcaatgttgctaaggcagccgagcatttgaatctcaccccttcggcagtgagtcaccaaattgctaagcttgaagaaatgattgggcagagtttatttattcgtggtgcccgtggtgtgacacttactccttcaggtgagcgctattttcaagatgtcaccaccattttgcataacctaatgttagccacggaaaaagctgccgataaaagccctaaagacagtttatatattcattcatccccaagttttggtttactttggttgctccctcgccttgaatcatttaaagaaaagttccccatgattcaggttaatttgtcgtgttcgtatgaaaatttgcactttacccgcgataagatcgacattgatattcggcatggtttacccaactggacaggggtagaaatcagaaccattcgtaatgaaaaacttgaagtgcttgcgtcccctaagctactggaacgtagtcctgtgcataaacctcaagatttattaaagaaagatctgattttatcgcgctcaaccttagtgacttggccccaatggtttgcccatcagggtttaagcattcctgaatttccctacactttgagttttgaccgctcttatatgtcacttgaggcagccacacacgggctaggttttgttttagaaagtaatttactcactcaaaattacttagaatctggaaagttggttagagtttttgcagatgagctatcgattccaatctctgctcatcacttggtatatccacgaacccaccaatttattcctaaaattgagctatttttaaactggattcatgatgaattgtcaggctgagaaatcatttcttaaatgatctgaatttgctcaactcgtaagtgatgcatcatctctcggataaatacaaagtaggtaaaaatataaagctgatttggatccacttggtttgtgtagtaactcaaacgctcaataaaactattaaatccattctcaagctcgatacggctgatttgctttttagcactaaaaaataactcactgagttgtgtcatggtggtatcagccgtaacggctataccatttatattgagatttctgagtggctgcgactcgatgatttcttcaataaaataaatcatcttttcaatcgcaagctcatcaataacaccattgctgatactttttgaattaataaaaactaggccctgctcaaggtgaatgggctggttatctaagtcaaatgacatgccattaagaccaagtgaaaactttaaaaccgagttgggatgattcataaaaatagcttactgctgaagtttgctaataaagttaatttgtttataaccctaaatggtatcgactgttcaatactcagcattaactgatcgattattattaacactatatataataaaaacctctttaaaaagatgaaaaatcaatcttatattcatccagtcttactattacaaaatagagtataagcatgaaaaaattagcaattttaggtgttacggtttatagctttgcacaactggcaaatgcagcaacgttaaatgtaaaaccatatggtacgactcaagacggccaaaaagttgatctatacaccatgagtaataacaatggagtctcggtatcttttattagttttggtggtgtaattacacaaatcttgactcccgatgcccaaggcaaacaaaataatattgttttgggctttgatgacctaaaaggctatgaagtcactgataccaaggaaggcattcattttggtggattaattggtcgttatgcgaaccggattggtaatgctaaatttagcttagatgggaaaacgtataatcttgaaaaaaataatggcccgaactcattacatagcggcaatcctggttttgataaacgtgtttggcaagttaaacccctcatttctaaaggtgaaactgttaaagcttctctgaagttaaccagtccaaatggagatcaaggttttcctggaaaattagatgtagaagtgatttacagtctttcagatcaaaatgaattcaagattgaatataaagccaaaactgatcagcctacagtcgtcaaccttaccaaccacagttatttcaacttatcaggcgctgggaacaatccttatggcgtgctagatcatgtggtacaactcaatgcagaccgtatattggtaactgatcaaaactctttaccaacaggtgaaattgcttcagttgcaggtacaccttttgattttcgaacgcctaaagcaatcgtaaaagatattcgagcaaataatcagcaattggcctatggatatggctatgaccaaacttgggtaattaatcaaaagtctcaagggaaactcaatcttgcagctattgtggttgacccaaaatctaaacggaccatgcaagtcttaaccactgaaccaagtgtccaaatgtatacagccaatcatttattaggaaatattgttggcgcaaatggcgtactctatcgacaagcagacgcactagcattagaaacacagcattttccagacagcccgaatcaaccggctttcccgtctacacgtttaaacccaaatcaaacttataacagtgttaccgtatttaagtttggtgttcaaaaatagtctttctaatgaggctatgttcatattaaaaagactctcagctgaatatggctgagagtcttttcatttatttaacttttgtgtttggtaaaagtgctgttgcaaaaccaagtaatggcaacaatgaacataaaccaaatacccattcaatgccgttaatatccgctaaatgccctagccccgctgcggcaataccacttaccccaaacataaggccaaacattaaacctgcaatcatgcctacacggcccggaacagcttcttgtgcataaaccaccatcgctgcaaaagcagatgacaacaccaaacctgcaataattgagaaaactgttgtccaaaataggtttgcatacggcatcattaatgcaaacggtgccataccaataaatgaaacccagatcacagctttacggccaattttgtcaccaattggaccacctgcaaatgtacctacagccacagctgccaaaaaggcaaataagtgtaattgagctgtttgaatactaatatggaacttttgaattaaataaaaagtaaagtagttactaatgctggcaatataagtaaatttagcaaacatcaacacactaattgtgctcaaagcaataatgagcttacggccatgcaatttagtatgtacttgagttgcacgtgcagctacctgacttttagcatggtttactgtccaacggcttaccccaaataaaacccaaatcgctaaaagtgcaaatatcaccaagcccgcaactgcatgctgcccaaacgggacaatcagtaacgctgctaataatggaccaatggcagtacctgtgtttccgcccacctgaaaagtcgactgagctgtaccgaagcgcccacccgatgccatacgcgccacacgcgaagcttctggatgaaaggtggcagaccctaccccaatcagtgcagatgcacataacaacacagcaaaacttggtgaaaatgccaacaagataatgccgcagaatgtgacgaccattcccagtgggagaagatacggttttggatgtttatcggtataaagtccaatccaaggctgtagcagcgaacctgtaatttgatatacaaacgaaatcaggccaacctccgcaaaactcagcgaaaagtttgcttttagcattggatagatggctggtagcactgcctgaattaaatcgttcagtaaatgtgcaaccgccacggcgcctacaattttaataatcattccttgagactgatcatttgcaacggtattggcaataccatctttcaattgtattgaagacgtcatacctgaaaaactccaatatttttaaatgagatgcttattgtaaattgtcgcttataaagttatcttccaataatcattgtataagtgacaatttttaggatagtttatgtccgattctcttattcagtccgatttgtctgaattggtaattggactctcttccgagcattcttaccgagaaatcacgcctactcatacacatacgcgtgctcagtttttatatgcatctaccggaaacattcaagtttttacacctaatcatgtatggattgtgccgcccatgtgcgcgttatggattccggcaaatgtagagcacagtgtgatttcactgagtcacgttaagttaaatacggcactggttgaagtaaatgcagccgctcgaatgggacaacattgctttattattcgggtgagtaacctgctgcatgaacttttaatacgtttaaatgaaattgaacgagaggaaacgccaaatacagcaacctctcaagagctttcccgttctttacaaattttgatctttgaagaaatacagcgagccaatttattgcctatccagataccgtggccgaaagacaaaagactcttaaaaatttgccaagagttattacatacgcctaaccattcaagagatttaacagattgggctgatgatattggcgcgagttctagaactttaatgcgtatgttccagaaagaaacggggctatcttatcgggcatgggtacagcaaatgcatattgcacttgccttgagtaaaattgcgaatggcgaatctattgctcaaatttcagagtcactggggtataccaaccccagcgcgttcagtgcgatgtttaagcgacatctaggtaaaacacctcagcagtttagaagtgctgcgatgtcgctataagtctttttttttgcagggatctcatgcttttcaagcaaatcatcgaaatcatgataaacatgaagttctcgatctttagctgttcttgcatgatctaatcgttgttcaggatcgactaaaacaagagtatggccatcatcaatcagacgatctacaccttctaagaacatacgtttacccacatcgtggataagtgaaatctgggttaaatcaatcacgattgtgctttggtccgttgtctcgtcttgtaaaatacgcaacaacatttcagcttcggtaaatttcaatacgcctcgaagcacatacacacttaacgatgcatctttcccagtacggtaatgactttgtacaatcgtttgtgcagaaggcgtaccttccatgagatgtaatcccatgtcacgagataatcgctctaaaatatcaattcctcgaacactatgaccgtgctcatctagtcgaggtgaaaaagcagcaatactaacttgacccggcaacacccccaaaataccgcctgctacaccacttttagcaggaataccgacagttgaaagccagtcacccgcggcatcatacataccacagctcatcatgacactgagtacttgtctaactacagatcggttcagtaatcgttttccagttttagggtcgaccccgccattggcaagtacactgcccatgcgtactaaatctttaactgtaaccatgatcgcacattgacgaatgtaaccattcacaatatcgacagggtcagtttccaaaatccccaccgtgcgcaacatataaccgatcgaaagattacggtaggctgttttgacttccgaatcataaacagactcatcaaaacttaattcgcgaccagcaagctcgctcataaaacgtcgtagaatttctgcactatgcaaaccatgtttgacctgaatcaaggaatgtacagtaattgcaccagagttaatcatcggattttttggacgaccatctttacccaatgaaatttcattgaaggcttcccccgaaggctctacccctactttcgcaagaactgcatcaataccaagttgttgtaaaacataagcatacacaaaaggtttagaaatcgattgtatggtgaattcaacatcatcatcgccgaccgaataaatttcaccatctaccgtagacattgctaaagctaatcgatttgggtttgcatttgccaactcaggaatataatcggcgagatgaccgctgttatcgatgtcacaggcttctataacatttgccaaataatctgggagaggggttttcatggtcagtaaccttaaatgaggagatttacaacatcgcgcaaaatttcagcacaacctgctgataatattaaaattatatcttttgtaatgagttaaaaatcacgatataaatattttaattctgttctcttatttatttcaagctcattatagttttttcaaaactttaaactgaagattagcttattctttctacaaacaagattccatttaaatgatcgacctcgtgttgaacaatacgagcaggaaaaccgtgaaaaattgtttcaactgcttcaccctgaagtgttaagtatttcaccttaaccatttctgcacgttcaacttgtccacgctcatccggtacacttaagcagccttcttcgcccaaacacgtttcactcgaaaattctaaaatttctggatttaccatgaccacagcattcatttcaggcgcatccggatagcgtggatttggtcgagaagccacaataataatgcgtttagagatataaacttgcggtgcagcaatccccactccattgcgctcaagcatagttgcatgcatagcatcagcaagctgataaagccaattactgtttaactcatttgccgaaacaggagccgcaattagttttaaaatatcttcaccacgctttgcgacaggtaaaaccacactcatcctttgaatctcttattaaactggctatgactagttttattgtgtcgctgaacggcccaaaagaaaagtcattcctacatctgtttttgttttatctaaagtgttttttgttttaaagctttttgatctgagtaaatccattcggcgttgccctatagaacaaatttcctccatttacttttatttcacttttccattaatatccaaacttcaattacaacaattaagtaaaaaatggatcaggaattaactttgcaggacgcgaactatcttaataaagaagataaacgaactcttgccctttcttcattgggtggagctttagagttttacgattttgtgatttacgtgttttacgccaaaatcatttccgacctctttttccccagcacacttagtccgttttgggccatgctcaacacttacggcatttttgcagcaggttatttttttaggcctttgggtggggttgtcatggcccattttggtgatttggtcgggcgtaaaaaactattttcgctttctattttactgatggcgctgcctaccctatttatcgggattttgccaacttttgaaaatatcggatatttggcaccgctacttttattactcatgcgtgtggtgcaagggattgcgattgggggtgaaattccagccgcatggacatttgtttctgagcacgtgcctgaaagaaaaatcggactagcaaatggtttattaactgccggactgtctttaggaattttactaggcgcgctcatgtctttatggatttcacttaattttagtgaaggacaaatccatgactgggcgtggcgtattcctttcattgtgggtggtatttttggactcgttgcactttatttaagaacgtatttgaaagaaacccctgtgtttaaagccatgcaggcccgtaaagaaatttctaaagaaatgcctgtaaaacaagtcttaaaaacgcataaaacagccgttgcaattggcatgttatttacatggtttttaacgggatgtgtggtggtggtgattttagccatgccaaatttgttgattggttcatttggctttgagcgcgcacagacttttgaaatgcaaagtgcagccattgtcatgcaaatggtgggctgtattttagcaggctattttgctgaccgttttggctgtggcaaagtcatgatggtcggtgcgcttgccgtggcacttacagcggcagttttttataacagtttaggtcatgcggcacattcaaccatttttggtttatatatgttgttaggtctatgctcaggtactgtcggcatggtgtcgagcagtatggttaaaatgttccccgcgcctgttcgcttctcgggcatttcattttcttataatttatcgtatgcaattgttggtggtatgacgctacctttagttcattggctcagccaatatagtgatattggtgcgatgtattatattttcgcgctaaccattttggcctttgtaactgcctttgtgttttggaataagtttgaaaaaaacaggtattaaaaattttcacttattaaataaaaaaccacgccgattgcgtggtttttttaatactgcttattttagaaagtaaacccaatattaaagttaatacggtataaccatttatcactatttggtgaagttgcagaggtataacccgttgagttggttgccccaccaataatgttagagtttttaccccacgtataatctgcccaaaccataaatggtgaagcaataaacatcatccctgtggtattcatttgcgagtctgaccaatcatcacgttttttatcaagataactataatcattataaaacttaatggcttttagcttgcccatattggtcacaggcaacgtataggcaaggtttaaactggcaatggttccttccgaagcaatgaaataagcaggtgtaaaaccattattgcccattaaggtcatgtcactatttacaccatccggatttttagcatcgtactgatagtgaatgaccgaactttgtaagttaaagcgtttgtagttgttttcggtatgcaaaccgactgcataatatttaccgtctttatcagtcactttgttatgtagctgagcgattgcacccgagacaccaaactcttgcttaccgaaatcagtttctaacttgcgcacaatgcgggtattaaactgatgacgtttttcattctgataagctttttgagatggaaatgcattttcttgcaagtcatcataagttgcactttcaggtgaataacgcaagttggtttctaacatttgcgggtaataaccgagttttacatcccaatctttgtcgtgataattccagttaagccccggtgcaatgttattgccatatcctaaaaagaatggaatatgataggtccagccattttgcggatagggataaatcgtaaatggtttataaaccaggcccgcttcaatgctgttattggcatctaggttatagcccacgtacgctttttcaatggacgttttctgttggtcttgaaatagatagctggcgttgatataggcatcatcaaacttacctttgagatctaccctgaaaatatcaaaatagagcttaccgaaaccacggtttggcccttcccaatcttcataacgttgatttaaccgaaccaccccacctaactttaatgaatccgtaccatcatcacttttccattcaagcaatgagtcttttgcaaatgcattgacgcttacccccagcgtaagcggtgcaatgaatgccatgatcaatgaagtctttttcatctctacatccttgattgagttccagcgtcctgctggaactttatttgttttacctgtaaaacttcgtttttattgttttttagacaaaaaaatttatctaaaaaaaggatggcttagcagctcccatcgcatatgtactaaaccatccaaactggttaatacagtttcttttgcggtggacccgcgaagtttaatggtccaatcgagttcatatcgagctcaatcacggttggtccttcaaaagcgacagcctcttgaataaccgttttaaactcttctgcactaccgactttccagcttttcacacccattgattcgccaagaagtttgtagtcgggtgtatgtaattcattgaaatactgacgaccaccgaagtagttattttgaatgccacgcattacgccataaccaccgtcattcataatcattaggaccatattggtgttttcttgcaccatagttgcaatttcaccaatacccagcattaagccgccatcaccgactaaaccaattacttttttgtcagggttagcaatcgaagcaccgattgctgttgcaaggcctaaaccaattgcacccgcaagtgagtggatgttttggtttggcgcttgtaccgggaataaacgactgccccatgtactacccgacatggtgatgtcacgtacaaaaatgccgtcttgaggtaaagctgcacgtaagtgatcacaaattaaagcgtattggtcgatttgtttacgcagtgcatcaatcgcagcttgtttagcagctactacagcagcatcgtaatcggcatcaacttttgaagttccttgaagctgttctaacacacgtgttaagacatctttagcatcgccacaaatgaagttgcggattttgtaattacgttgctgagccacagggtttgcatctacctgaataatgttttcaggaaattcaaccgaataagtttttgtttcattactacgtaaacgagaacccactaccaccatcaggtcagcatcttttaataattgctcaacacctgccgagttatggaaagcacctaagctacgtggatggtcatctggcaacaccccacgagcatgagtcgatgaaacaaccggaatacctaaatctgcaattgctttcacttcagcaacactgtttaaagttccaccaccaatccagaaaatcgggcgttttgcttttttgatttcactgacaagaagatcaatttcagcttgctctgcctgtggcaactcaagtgctttcactggcccaagattaagtggcaaatcaatctctgctgcttgtacatcaatgggtaactcaacacttactggccccattggaactgtagttgcgacacgaatagcctcacgaatcacaccaacagcattgtctgggctggtaatacggaacgccgctttgcttgatgcacgtaagaatgtaagttggtctttggtttcatgaatgaagcttgcatcacggtcaaggtactcacgctcaacttgccccgttaaatgcaatacagggctacccgcattcattgcttcaatcagtgaacccactgcattaccagcgccagcacctgtactggtcaacgctacacctaagcctttaaagcgtgagtgtgcatctgccatagtaaccgcacccgcttcaccacgtgctgcaacaaagcgcattttttcacggcgccctaccgcatcggcaataggtaaattgtggatggaaataacaccataaatactatcaacttggtgcgcttctaaaactcttgcgattgcttcgcctacatttacacgttcagtcatgtctgttcctcaaaatttgttttcagtccttgaatttattaatcgcaccaagggttaggctgttcattcagccccatataaatactcttttgttgcatgtacgataaaatgcccaaacggcctttttcgcgcccaatcccactgtctttaaagccaccaaacggcgcactaatcgagaattttttgtaggtattaatccataccgttcccacttctaaggcacgtgcaatacgccaagctttacgatagctttcagtccaaatacctgcggcaagaccaaaacaactgtcattggcttgggcaattaaatcttgctcgttgtcatatttcataaccactaaaacagggccaaaaatttcttcctgacaagtttgagcactgttatttaagcccgtaataatcgttggtaagtaatagcttcctttggcatagtcaccagtcgtaagtgcctcaccaccaatcagaacctgaccaccttcgcttttagcaagttgcacatagcgatcaactgactgcaaatgtttgtcattgaccagtggtcctaaatgcacgcctgcctgttccggatggcccacacgtaaacctttggtaatttcaaccaaacgcgttaaaaactgatcgtaaagactgctatgaataaacaagcgagaacctgcaatacacgcttggcctgccgagctaaaaataccgtaagccacacctttagcagccagttcgacatctgcatccggtaaaacgatggttggtgacttaccacctaactcaagcgaagtggtaatcagtttatctgcagcaatatgtgccaaatgacgacccgtggttgttccacctgtaaaagaaattttacgaaccaatgggtgctgagcaattgcgtcaccaatgatagaaccacgccccactaacacactaagtaagccttttggtaaaccagcctcttcaaaaattttggcaagctctaaagcaatgagtgaagttgcttctgctggttttaacactacagcatttcctgctgccaaagctggagcaagcttttgaacttcactcgcaattggagagttccaaggagtaatagctgccacaacccctacaggttcatgcacactcatggtcataaagtctggagcacgttgagtggtgagctcatcgttcagtgtttcacatgcagctgcaacataacgtgcagttgccgcagcactcatcaccaagccacgagtttcggttaaaggcttaccattatcgcgggtttgtagttttgataattcatctacacgcgcttcaataatgtctgcaactttgtagagaatacgtgcgcgctcatgcggcaagctgtttctccagctcggttgacgccaagcctgttctgctttttcaattgcttcatttacatcttcaagcgttgctgttgaaagctcagcgtttaccgactgatctgccggaaacaggctttgaatgactgcaccacggcctaatcgccattcacccgcaatataaatttcctttgccatgatcaaatccttcttaaatctgtattgcttctacactgttgcgacaagcacgaatcacgctaagcgcagccaaagttgatgttttcgggttacttggcagcggcacacccaccagttcaatggtcatttgtccaaagccaccttccgccacaatggtgtgtttgttcttgttgatagttggatcaacagttaactcaaccatggtttcatccattccaagccctgcaagtgcaatcgttgctgcaacgttggcattggccggaaatttcatagcagcttcacgagcagttccagtaaaaaagaccgtaggttctgaaacatggtctaaatcgaccaattgctctgcataactgcccttccagctctttggacttttacagcctttataagtgaccttttgcaagccaccttctttagcagcagaaataccgtcaatacctgcgatagcccctgccagtaaatgcagatgggcatcatttttttcggcagtttgcttaagctgaaccaaaaattcactatcagccaaagtacccaccgaaatcagaccaatggtccagcctttcgctaaaactttttgagcatgctcttttactgctgcttgacctgccacctcaatgacatagtctggtgtaccatcacattgctcaatatctgaaatcacttgaatgtcagaagagacttgtgattgcactttttcaatgctgcgagatggcactacaatccacttgagttgcagatcttgaggcaagtgggcatacacttctgctgccattgcaccaaaaccaatcatcatcaactttttcatgacagcacctgatatttataaatgtttgttaaaaccacccgagacatctattgccgaacctgtggtgtaagatgccaatggtgatgccaagaaaactaaagcacgtgcaggctcttctggacggcctaaacgctgcataggaatgccacgattttttgcgatattgccggtccactcttcccatgacagatttaaatctgaacgggtttcataacggcgtttccactgcgcagattcgaccattccgagtaaaatcgaattcacacgaacgccatattgagtaaattcatgtgccaacgaatgggttaaattcaacagtgcagcacgtgcagatgaagtcgcaatcatgtgcggttccggttgcaatgccagtaacgagttcacattggtaattgaggcatttgccgactgttttaagtcgtcaagaaaagcccgtaccggatgtaaaacactgaaatatttcagctcaatctctttcatccagtcttcatcttgcgtattttcaaaatttgaaacacggccttgtccagcattgttaataagcatgtccacattgcccaaattgagtttgacctctttggcaaattgctgaacttcttcttttttcaaaacattacatgctttggtaaaaatattggcatgtggaaatttttctaaaatatagtgcttagaagcatttaaacgttcttcatcgcgaccacaccaagcaacttttgcaccctctgcaaccagtatttcaacagcagccagcccaatcccagatgagccaccggtaacaactgcaacttttccttcaacttggaagctcataatccttaatctctcttacgattgttcctgaatcgtcaacataatttggttaaatgcttgcggttggtcgacataacttaaatgtcctgcatcttctatgacgaagcgctgttccaactgcaattcctgagcaagctcttgtatacctaacgcaggagtgatttgatcttgctgccctgcaatcactgtgcatgggacttttaaatcggttaaataattacgtatttcgtcatatgccagtaagtacgatgcatgtgtgaaaccttgtaaggtcaactgctgcatcacttctgaaactaaagctaaggcttgtggctcttgtttataaatcaaatgaggtccacggctttgggccattcctttagcaccgagttctttcaacatttttggtcttttttcaaaaacctgaatttgtgtctgttcatcgtggcgttggtagccttgcgccaagttagcgaccaccaagtgtttcactcgctccggacaaagtgcagcaaatgcactgccctgtaaggcacctaatgagtgtcccactacaattgctttttcaatttttaaagcatcgaacaaccctgccaaacgctttgcgtagtcggtcgcattcggttgatccgttaaaagttcatctgatttgccatagcccggtgcgtcccaggcaatgacatgaaaatgatgagacagcacttcaagttggtttacccatgaagcagaaccggaactgatgccatgcaacagcacaaggtattcgccctgaccagcttcccgataggcttgctgctggccttgaacattgaccgttttcaccggaaattctgctaacttttcaatgagtgtcatcatttttaattctttccttcattcacttcatcaaacaattaacgtttgatttgagacaatggatgctctggtggatagttaggaattgttggtttacctgttcccaacatcacacacatcaaggcgtcttcttgacctgggttaaacaaaccacggtaaattcccggtggaattgaaatcaggtcacgctcttttaagcgggtctggaatttctcgccgttgtgctcaataaacaaatcaatttcgccgcggagcataaagaaaacttcttcaacgtcgtggtgaatgtgcaaaggaccttcacactgtggtggtaacaccatagtcgaaaacgtaaagttctctgcaggtacagtattgctgtcatttgcaacaccagttgcacccgtacccatatagcgcatttgagcacggcgatatttcgggtcgtaatcggcttggaacttcaaagcctcaaagtcatatttacgagtctcaaagcgagcaatacgtgtgtttaaccaatcttctaaagaagcgccttccggctgtttccacgattcgaattgttgtgtagtcattttttaaactcctatacagtgaattaataacgttttaaaagaggaaccaagaacaacgacccaatgacagcgactgcagccaagaaggtaattcccaaattaaaactatgtgtttgcatcacgatgtaaccgatcagtacaggtgcaattgcacttgcaaaattgcctaaaccgttaaatattccacccgctgtcgcacctacatttgaggtggttactcgggcaagcagagcaaataccgcagctactccaaagccccacgccatagcacttaaagacatggcagcaataatcaataatggctcagtcataatgaccatcacatacatgaagatgcccgcgagtaataaaccgctaaatacttgaattgcgcggcggcctaatttgtcagataaaaacgcaccaaccacttcgccaattaacatggcaatgaatggaaagcttgaatacaccccaaactctttgaggttgaatcctttgtcttgcatgagataagaaggaacccaactgtttaggccccacaaataagtcattaaggcaatattgaataagcacaccaaccagaacgcgctattgctcacaagtactttggtattggcgatatggcctttgaagttagtacgtttactttcaccttcaagctcaacagttttcttgagttgcaagttacgcagaccaaaaacaatgcttaaaattgcaatgagtgtgagcgcagccatcacaaaaaaagtggtatgccagtcgtggtgtgccagaacggctgccgtaattgggaacccaaggaatgcaccaatcggtgtacccagtaagaacatggttgaggcacgtgcctgctgacggtctgtataagtctgcttcacaatggtgtacgccaaagcaaatagcggaccttctgccaaaccgagtagaacccgtaaaatcaacatgcctgagtagctggtggtaaagcccatgcaaagcatgagtaaaccccaagaagtcacactccagaacaacattttctttgggttaaaaatgtcgcctaaaaagcttaggaagactgatgaaaaaccataagcaagtaaaaaacttgtcatgagccatccgagcttggctttatcttcagcaattcccatcgagctttgaaaatgtgggtctgaaaataaaaccgcaatactgatcttgtcgaaaaatgccagtactacacacaccataaggacaaaagcaggtacccaatgctttaatccacttttttcttcattactcatgtgtcattccttcgatttggtaatgagaaccagatttaatgtttacggttttaacttcatgacattaaattcagcatctgctaataattttggatctaaaacggtattggcttgcatccaacgctttgccagtttgattaacttcgagtcattaatggcaatcatattcagcaagcgattttcatggtccagatataaatagctcacctgatcttcaccaccttggcgaatcaccacttctttggttttttcaggttgatatgttcctaaaatctggatattaaagtgatattgatcagaccaaagccaaggaatatcggtatattcagtttcaattccgagcattgatttcgcagctgcaatcgcctgattttgtgcatttgcccaagactgaatgcaatagcccaaacccggatgaatcgcgacatcacctgcggcataaatgtcttgatctgaggtttgtccaaaacaattcaccacaatgccatctttcacatcgagaccagcgtgtacccctaactctttcgcgatctcagcgcctgcacctactacaacacagtcaaacaactgactatgttgaggatggttcaccacttcaactttttgatctggtgcttccactaagtgaaggctcttgctgtctaaatgaatttttgtgccttgagcctcatgcatattttttaaaaatgcagaaacttccggactcacacttcttgcacataagcggtcgccatattcaaaaatatgaacatctttcccttgcttacgcgcagttgcagcgatttccaaaccaatccagccaccgccaatcacagccacattttttgcattctttaaaatttcagccagacgttcacagtcacgtacatttcgcaaagtcacaacatttggaatgaactgccatgtattgacgggtacacgggcgcggcttcctgttgcaatcaacaatttgtcatacggcaaaatctgaccactttctaaatgaacctgcttttgctcgcgatcgacttttgttgcaatttccggtttgtgccattgaatgttgaactcttgaacctgttctggagagaacagattcaaactttcataacttgcttcttttgaaagtacttgcttagacagtggcggacgctcataaaacacgtgatcttcatttgagaccacatgaatttcacccacatatccattttgacgtaaggtactaactgcccaacctgcagcctgccccgcccctacaattacaatcttttccatagcctttcttccttgtaaagcaatgcctgttacacaggcttcacctgacggcgggttttgtcatcaagaccaccttcaatcgcccactcggtgaaaagctctagacgatgttcttctacacgtggctgccattcttcggtcaaataatcatcgttggtgtaatattcaaatgcaccacccaatggtgagttgacgtaccagaaataagcagaagaaattggatgacgtcccggtccaataaaggttgaccactctgaacggttcatatgtaaaccgcctccaatcacctcatgaatatcacgaacaacaaatgcaacgtgatttaggcccgcagatttatttggaacgctaagtaagaataaatcgtggtgataaccttcaccgcggcaacgtaagaatgcaccgcgatttttgtaagcatcagataaatgaaagcctactttttcaatatagaagttttcagtagttgctaaatccggtgtgaagaacaccacatgtccaatcgcaacaggttgacctttttcatagacaggacttgctgcattcacacgttgaatgttgccgtattggttaataccttccgttttaagttctggtacttcttttacaaaactttgttcaaaacgaatggtcatgccatttgggtcaagacactgaactgtattttcagtacgtttaaaaccgtctacatcggctaaacgagctgccaagtcttcaaggtcttgagcattttcaacaccccacgtaacttcacgtaaagttgaaccttgctcaatagcaggcggtaaacggttatcatcacaattaaatagataaatcttgctgccgttttgagtctggtataaatctgcaccttcaatatccgaagtacttttgcttaaaccaaaatctgccaaaaacttgtttgaagcggctctatcttcaactccaaactttaaaatctcgatccctgtaatcatttgactactccttagttaaagacaaaaccgccattgaccggaatattttgacctgtcacaaaagaggacaaatccgacagtagatacaatgctgttccatttaaatcttgtggaagttgctggcgttgaatcgctcttccgttgacatataaatcatgacgttcctgtggcacatactcggttgcttcaaccagagtcagccccggagacaaggtattgacacagatattgaactgccccaactctcttgccattgaacgtgtcatggcaacaattgcacctttactcgccacataagccatcaggtttggcgcgccccaaagtgctgtatcggaagcaacattaataatcttgccggcagccgattgttttaaatgtggaatacacgcttttgtaattaaccatgtacctttcacattaatattcatgacccgatcccaaagttcaggatcgtaatcaatcatattttttccaccgacattggttgcaagcgctgcacagttcacaagtccgtctagtccttgtaatacttccacgctttttgcgacagcattttcaatagagtctgcattggcaaggtcaactgttactgcatgaacgtttagcccttgttgctgtaacgcttgcgcttcttgttgcaccaagtcagacaaaatatctgccatcacaacttcagcaccagcctcggcaatagcttgagcgaaatcccgccctaaaccacgtgcagcaccagtcactaaaacttttttgccttgcaacaacgctacattagccatgagcttcttcctgcatctcgatacggtttgatgcatttagcgcagcaattttctttaattgcttttcagcttcttttttcattaaacggcgtaaacgtgcaagccctacatcgtgttgatataagaattctcgtgcacgcgcatttggcgcaaggttttctaaaataattcggtcttgttccaatacatcccaatgcaactgttctaaatgattgcgatataagaagcgccatacattacgttgccaaccactcaccttacggcagcgccagaaaaatacacgggtattgttagcatcaattggcgttgcgtaacccacaatccagaattcaccacccggaccaaactgtttacggtaaggaattgaaagacgtaaccaacttgcaccggtcgaaccatattcaacccagtcaaagttcacacctgtttggccttctttttcaaaaacaaaaccattttcagttgtgcggtgtttcatctctgcggtacgttcaccttctgccattgaatgtgaagtacagtgcaaatatgtaccgtgcattgggtccatgacgttatcaatggcatattgatggtttactttccagtctgcttggcaaaggaatgaactccactcttcgcttgccagttgttctgggaactcaagcggtgcaggttgttcatttgcatcgataccaaaccagatgaagattgcaccatgctgttcaatgaccggatagctctttaaacacttggttccagtcattgggcattcatgaacggctggcacatcagcaaccacaccatcagcacgaacttcaacaccgtgataccagcaagcaactcgatcacccaagttccagccgagtgaaagacgagcaccgcggtgtggacagcgatcttcaagcgcatgtacctgaccttcggcatcacgccaaaccacaatgttttcacctaaacgcgtaatcccaaccggattagcagcgacttcccaacttgctaaaaccggatgccattggtcacgtaaaccaagttctaaatattcttcagcgctttgtgaagttgatacgattgcgttcattttattcttccctgaatcaataacctaaacgttgcatttcttctgtaaagctctcagaagtccattcatcaccagattcagagcggaaaccctgttgattaagtgcagaaacaacctcatctaattctgttgcgcccgcagaaaatgcctgaatcaagttctttacaaagtcttgttcgtagagagtcggttctttataacgtgtttgccaaaccaacaattcagattgacctggaacttgaatattgttgatacctgcttcggttgctggcgttgcatgaatccagcttgccaacttttcattaaatttcttcattgttctgcttccttgtacatgtgaggactagagttgaatttgaatatcctgtccttcaacacgaactgggtacgtacataggtttctacacccgggtccactttttagctcacctgtctgaatgtcaaaaattgcttcgtgcaatggacattccacagtttgatcttcgataaatccttccgttaataaggcatacgcatgagggcaaacattttcgatagcgaagtaattttcatcgacaaaaaaaacaccaatttttttcccttcaacttcgacggctttcggctcatcttcgctaacgtcaccctgctgacaaactgagatccaactcataccttgcgtcctcattttgttttatatacaaaacataatttgattttcaaaacacaagctaagcataatcctcttgattaatttttgtcaaagtaaaaataaacattaaaatcaattgattaataaattttaaataatttgttacgtttcaatttggaaacaatgttttaaatataaaaattgttttatgtaatctttataattacaatagttctaaaataaagcataatgccccaattcgaaccctgttttatttataggaaaacgacacgaatgagcctagagattgaagaagattcgcaagaatcagaaacaacaaaaaatgatgatcggtatttagtaccagggcttgtgcgtggtttagccatcttgcaagcatttaatcaacaagcacaagaaatgacgattacagaaattgccgaaattttggaagtgaaccgttctagtgcatttcggcttatctatacacttgaagcttgcggttacttaagaaaggcttcacaaaaaacatatgcgcttgattcaaaagttatggagcttggttttaacagtttatcaaagctttcattacttgatttatcaacgcctttaatgaaagaactacgtgaccagaccaaacttgcagtacacctgaccgttttagaaggtacacacattgtttttgtaaataacgttcaatctatgggtacgtttaccagcaatattagtttaggtactcgctggcctgcccatgctacagttattggtcaaatgttattgtcagatttaccagaggcagaagtacgacaacgctatcgcaattttaatgactgggatagttactcagaacttactccaaccagtttaaaagcgttattgcaaaaattaaattatgtaaaaactcaaaagtcgatggtgagctgggggcattacaaccatgacatggctgcttgtgctgctcctattttcaaacaatcaaatggaaaaatggtggctgtcctttcagtcagttgcccaattaccacttatgatgagaagacctttaaagaagatatcgccgctctagtcatcgcaacggcagataaaatttcaaaatttatctattaaaaaaagcgacgttaagtcgctttttttgtactcttatttcttcaattaaaaattacgcttaaaaatttcaccattcatatcctgaaaactcagtgttgaatgattttctttaatatcaaactttaagtactgctgtttaaactgtactactgcataaaactcttctgccccatcatctaaacctgtcgcagaggcctgagtgccttgtggaaagtccttgagccaagcagcgttataaaaatccgatactgaattaaaatctatatatttttcaggctcacccataatttttgcagcaatttgatcaaactgttgttgtttataagtatctaaactcaacaacatgcttattctcccaattaaagctgcccagcatctaagttctgctttcttttaaccttttcccattgataccaaccataagctgccattaatacaaaggctgcgtataaggctgaagttaaaaacagatctttatagataaacatgccgacataaacaatatcgacaaatacccaaaggatccatgtcgcaatatgctttcggctggtccagtaagttgcaagcaaactaaatgctgcaagctgtgagtcaagcattggcaccgctgcatcggtaaagtttttaagcaccaaaccaaagagcaaaccacctaccgcggcaataatcatttgaatgatagctgtttgaactgcaataggctcaattcgaatgtcatgatcttgctgttttcctttgagccaatagtaaaagccataaaaatttacgaccataaaaaagaattgcaaaatcgtttcgccataaagcttaaattcgtaaaacaaataggcatataggacaaaagcaaagaaattaaacagccagcaccacatattacggattaccgttaatccaactccaatgaggctaattaagaccgcgaaaatttctagaggtgacataagagaagctgcttattgagatcaatttgacagcgtattatgagaaaaatataaagcgaagcaaactgctaatttaaataaatcatggaaaataacatgtctaaggatttatccttttcgcatgaaattgatttatttcaatgcacagacaaaagaaatactgatcgagttactaacaatttctatttgctagtttttcaatgattgtttaaaagataatgaaagacaaataaaagagcatgaaaatatgtcaaatcaagaaggaaaagtcagccgtgaaactcgcggacatatttttttaattggcttagatcgggcagcaaaacgtaatgcttttgatagtcacatgatcaaagacttatcactagcgctcaccgaatatgaaaataatgacgccctgcgctgtgcgattgtttttgctcacggtgaccattttacagctggtttagacctagttgagttacagcctaaactcgctacgggtgtgtttgattttagtgaaaacgaaattaacccttggggcacaataggccgaaaactgagtaaacctttgatagtggcagtgcagggttattgctataccgctggtatagaactatttctgaatgcagatattacgattgcgagtgaaaatacccaatttgctcaaatggaagttcaacgtggcatcttaccttttggcggagcaactgcacgttttactcaagccgcgggttgggccaaagccatgcgctatttgctcactggtgactcttttgatgccaaagcagcttttgacatgaacctcattacagaaatatgtccagaaggtacggagcttaaacgtgctatagaacttgctgaacatatcgcgcaagctgcaccacttgctgtaaaagcgaccctcgcctctgctcgtgaggcagtcaatgaaggttacgaagtggcttttaaccaactgcaaaaccatcttcagcctttactcacaacagaagatgttcaagaaggtgttttcgccatgctgcaaaaaagacctcctgtttttaaaggtaaataagtcctactcaagcactgcgctctacagtttaaaacttatggatataccgaaattagtgaaaaaaaagcccacatgatgtgggctttcttttataaatgtactttattcaactctaatgattttaccaaattcattatggtgaacgaccgtaattttttggctacggccctgctcaatttcttgcacaggcaaatcaaaatagcgcgcatagtcatctgtctgtttcatgttaagttcactaccttctacacggcgttcaggcaatacatgactccagagtagcaacccgactgcacaagcaatcagcgctgtaataccatgttcaatacctacaccgaatgcactgaataaacgatgtactaaatgagttttttgcagctctgccaatacccagataaacacgaatggacgccacaacaacaaccaagccgcccacatcatggctgtgcttgttgtagaagcatagcgtttatgccatggcaattgacggcgtaaatcaataatcaacgaatttgtcttcatttctctttacctaacgaagtgctgtggtttttccccagacatcaatacagcacgatctttaaaatctcatgactcttgcatttcatccacgaatgccccgatccgggctcacccaacgcgcacgtttctcatctccacgtcgtaagacttttggaaatgccacaatagttgccgagatggtgattagccaaaagaccaatggataccagatcatccagaaatagttttttccgagatgcggttcataacgactatccatccatttgcttaaagcaaactgaatgagacaggttgcccccaataaaataccgctaccatacggtaaaaatggagagctcacaacggctaatgcagggaccggtaaaataaaatgtaccaaccacaacaaagccatcgccagcattaaatatgaccagactaaagttaagcaaagctcaaacattaaaggccataaaaaattcaattttggtttggtgaacacatcaatatttttaattaatacctgtgctccacccattgcccaacgtaaacgttgtttccacaatccgtttaaagtttcaggcattaaaatccaaaccaaggcattcggttcaaaacgaatgtcccagccggcacgttgcaatttccaagtaatatcgatgtcttcagtcaacatattaggtgaccaatagtccacttggtgaacagcgctcttacgaaaagccgtaataacacctgatacggtaaataaacggccaaaggtacgctgagcacgtttaatcatgccgacaatcgaagaaaactcaccaacctgaatacgacctaataaagttgaacgggtacggatacgcgggttacccgtcacagctgcaacagtcggattttgaagaaaatgacgaaccatccactttgctgcatgcgggtcaagtaaagcatcaccatcaataccaattaaaaactcggcatcggtcattaagcttccagcttgcaaccccatggctttaccttggttttgagccaaatgaacaacacggagtttttcatgttgttcagctaatcggtcgagtacctcacctgtattatccgaactgccatcattaatcgcaatcacttcaaaatgaggataatccaattttaaagcatgagtaatcgtttcctctgcattatccccttcattaaaacaaggaataagcacagcaactttaggatagctttctaatggagctggctgatcataaggcggagctttacgttccttccaatagaaaatgatcgcgccaatcatccataaatacgacataaataatggataatagaaaacgaattttaaggcatgcgaccatatagcagcaaagattgtcatgtttcagcctcgcctatggcacaagacgagatgatttttcagcaaatgctttatgcatcacgttcacgtccggatgatctttgattgggtcatctggatagtatgcaacgtgcattgcaccttgctgatagagtgagtgaattgttgctgccatttcagttgacggtaccttttcgttgttacgccagtttgttgcttgtagctcaaaaactgttttcttaatgccgtttggatattttttcacgcgatcaatcatgtctttataaaattgatcggcgttatcgacctgctccatataaggcattgccataatagccgtaaaatcataacgtcttaatgactcttcaagcgattgtgaataccagttttccgcatatggttttaaggcaacttgcgcatataagttacgagctgtaagcaagaacggttcatattgtcgcacgtcttcaacaagttgcattgcaaaatcatctagatattttgtcttatatgcggtccatttttgcaaatcttgatcgttttcacggatttttgccaaatctgttggtaagccttgtttcgcataagcttttaatgcatctgggcttgcatcttcataatcagataatgtgacatcgtcatggaataaaattccattgaaagatgctgacttagccaaatcttgataaatctcacgaatagtttggcgtgcctctggtgagaacggacttaaacggatataccccatatttaagtgttcaccagcttttgcctgctctgtcacgactaaatcttttgataccggatcagtttttggtaattcccaagccaataaaggcatccaagcataaatacggcttacaggcgtacgggtttgaatttgccatgctacacggttaaacaagtccgcacgcattgggatatgacggttcgggaaatataccatatcggcagaaccattagcatccggatctgaaaatgcctgcaaataaactgtatttacacccatcgcattaattcgatctaacaagtgacctaaatttcgttcttgttgttgcggatccggatcataaatatagtcgagatcaatatgcatgattttttgcggacggttgttatccgttaagtttaattcacggttcttaatctcttgagccaaatcattagtactcattccgccctctaccaaaatacggctcatattttgtagagattgtttcgcatgatctgcgccatcatcaagcgtgatggtaattggcataccaagctttttagcaatttggaccgtttgcatattatagcgaccatatggccacaccataatacgtggtgaacgtataccatgctctttaagtagctgattattcttttttaaatcattataaatacgagcctgatattggctgtcattttcataagttttagtttttacatcataaaaacgtgtcgttgccgctggttcagagttcccttgcgggttgcctgtaataccgcggtgtaaatgatagctatggcttgcgatttcaacaaacccgctatcttgcatttctttgagctcaccccagcttaagattttatcacgtggaatttcttcacccgaaaaatcgactttctgccctgcttttggctctaaccatgaacccactaccgcaagtaccactgggatttttttagccttaataacaggatatgcattttggtagaaagactgataaccatcatctacagttaataaaacgggcttggttggaagtgccgccttgccctgatgagcacggatcaactggtctacggtaataaaatggaagccatttttttgcagccaatcgacatgctcagtaaattgttgagtggtgaccgcatattgaggaattaaggcatttttagtatcggtaatttcatgatacccaatgaccgtaagtgttgaagcatctattttaggtgggttagctaatgccatacctgacaagcctgctagagccaagccaagcgtgaggttcaacaaaggagatgcaaagcgggtaatcatgaaatagcgtctcaatagcaatatagattatttatgtgaaatttaaacttaagaactaaaattcacatttatttagtccttaagttcaaactgctccaacagaacagtttttcagttcacctttataattaaataaactgaaaataatcttaaatatttaaaaagctaaaatataaatatcgaatatatttatatttaaagcttatagataaagtcgagctctaaacggtttgatttcaatcatcgcgagtttttacatcaaataattcaatttcaaaaatcaaatttgagtttgccggaataattttacccattttgcgttcgccataagccaaatgagcaggaaccataagtttacgttttccgccaactttcattcccataatgccttggtcccaacctttaatcacacggcctgtaccaataacacactcgaaataatttccgcggtcaagggaagagtcgaatttagtgccgtcttctaaccaacctgtatagtgagtcgtaattaaggcacctttaaccgcttctttaccttcgcctacttttaaatcgataatttctaattcagtgatcataatattcccgttcgtttaatttcacagctcagacttgatctttagtctaacaagtgaatttgtaaaatttgttgcgcttttcagttttactgtaattgggtccacacaacattcgcttggcccttgtcacttaacaaagtccattcgttgtccataacatttaactgaagctgcatggtacgttcacaaagctgctctaactctgctgtactttcaggtgctagctgccaaacttgaacattactcaatgttttaattttactgtttctcttccaccaatcttcaacttgtgaaccataagcgacaattgccacagttttacaacgggcactggcttttttcactttatcttcagacggtaaaccaacttcaatccaggtttctaactgtcctgttaagtctttttgccaaagtgcaggctcatcggtttcaaaaaggtctttggtaaactcaaggctatcacttgcgaaacgtgcaaaagccatgacacgaaccattaatcgttctaaagtttcagaaggatgtaaggcaagcgtcagttgataatcgccataaatatggtcatccatattggcaatattcagatctgctttataaattgttgctttaagcgccatagttaatatgtccaaaaatttggcgctaagaatactcgattttaattaaaaaattatagaaaaaactcagtaatgtaaaacttcttatcctctccatttgcatcttatttcaaaacatctaaccactttcaaagttggcgggctttttgcttgaaaggggttgtattcctctcttgatttgatgacttatgtggcaaaaacttaaacgtagtttattcctacaagtcctctgcgctctcttcctcggtattgcagtaggtcttgcttttcatgatttctccctagctttaaaacctcttggtgatggttttatttctctcattaaaatgttgattgctccaattgtattctgtgtagtggtactgggaatctatggtgcaaacgatattaaaaaaatgggcaaagtcggtgcaaaaacgattctttattttgaagtggtcacgagtattgctttaattttgggaattattgttgcttatgtctttaaaccgggcgtcggtatgaatatcgatattactcatttagatgctaaagatttaagtacctataccgaacgtgctcatgacatgcatacaggttcggagtttttactcaatattattccgaaaacatttactgccgcttttgctaacggcgatattttacaagttttactcatcgctattttatttggcgtttccctactgttaattcctaaacatttagcagagttggtccgtcaagcgcttgaagctttttcggaagtcttctttaaaattatgggactcattattcgcttggcaccgattggtgtatttggttcagttgcttataccactgcaaaatttggattagattcactcctgcaactcggttatttagttttactcttttatgcgacttgcattttatttgttgtcattattttgggttcaattttaaaactcaccggactgaatatctttaaatttgtcggctattttaaagatgaactcgccattgttttagggacagcctcttctgattccgttttaccccaaatcatgaaaaagcttaaaaacttaggaattaaagattcaacagtcggtctggttattcctaccggttattcttttaatttagatggcttttcaatttatttaacattaggcgtgatctttattgcacaggcctgcaatatcaatctctccatgcatgacttactggctattttattggtttcgcttattacatcgaaaggtgcacacggcataccggggtcagccttagtgattcttgctgcaacactttccgtaattccaagtttacctgcaattggtttggtacttttactgtctgtagactggtttatcggaattatccgtgcctgcaccaacttaattggtaactgtgtggccaccgtagtcattgcccattgggaaaaagacatcgatcatgcacaagcgaaacaagtacttaatataaaaaattaaatctctcatagagaatattgaagtatttcaatgttctctattgttcaattctgcaagctaatagttcagtttcaaatgctagccagtcatgttcatgttggctaatcatttcaatgcggttatcaatgccctcttcaccagacttatagttaaactgctcaggattaaagttaaaggtcttccatccctgatctgtattaaaaattcccttaatacgtagccagtcttgttgtgcacacaacacatcgagcaaagcataaaactcaaatttccaacgcttaggaaacttccaacccgcgaccatataaccctgcgccgactcgacataatgataaggcagttggtgaatttcttttgcaacttcggcttcagtcatttgcttttgcagcttgagtaaaggctgtatagagcgtgcagttaaacgcgcaggcacatcaatttgcgccagttcaagttgaccatgttcagtctttagccattgttgctgataaggttggtattcttctttaagctcaacaagtgcctgttcatcttcaaaagtcatggtatcggcatgagagaccaccacaatctgtgcagcttttaattgatcttcatataggttttgcttggcccaattggtgtcatgcaaacgactaccatcaaccacggtcactagtgcacgcatagctaagctgttttgccaatgcggttcagttaactgatcaaataattgcgaaggatgcccaagccctgtaggttcaataaagagtcggtctggcttttgttcacttaacaagcgagccagagcaatatgcataggaagttggctactacaacataaacagccgcccaatagttctttgactgcataaccttgatcttgaggtaagagttgttgatcgactccgatttgcccaaattcattcattaagacagcccacacttcacctttcggtttctgacttaataaatgttgcaataatgtcgttttccctgctcctaaaaaccctgaaataatatgggtaggaacagttttttgggcaatcagtttcacaagcggctcaaatcaacaaggtttaaaaactaagaaaggtatatcactgtttaagtagcatgaaaataatttttcactttgaagatatacttttcaattatcaggctaaagcaccaaatatgtgacatgcatctcatcatttatctaaattaactttagaaaaataataattaaacgaaatatcctatttaaggacattcacaattcatgccaaagtgttttgtttacgtaactaacttgctttttttttactcaatacgaaatattctttcacatttttagcgctcaagtagcgctttaattttacagtagacgcacataaacggacgttatatttcatattgttaagataggcgtaatagattgttaagttaattgatgtaatcccaagctcggcttagcatgtgtcctagcttaatcattcagccctatatgttctatgtaggtcagaacgattaggtttgatttattttttaatgaatttaaggatgccataaaatgaaattagctaaaactttactcgctactaccctagctttaactgctgcttcaactttcgctgcttctaagcacgaccaagcacataacactgctggtgaagaaaaagttgttgtttcaactcaagaacaagcaaacactgcaaatgctgcttctgacgctgtaggttctgcttctgaagctgctcctgcaactcgttaattatctctgcactctcctccaagctcagagataattttactgaaacgaaacaggacgttaaatttcggtgaagaaaaaagatcgaaccatgctgcggttcgatcttttttttaagaagttttcttatacatgctacaagaagggttatgattctcttgtaggcgcaacaccttacgatgttcagccgcttcaaatcggcaacgtttccactcggtatctaaatttaatttaggcacttcgcgtggtttaccatgctcatcaaccgcaaccatagtgaaataacagctattggtatgacgaacggtacgcttttgaatgttttgagcctccacacggatacccacttccattgaagtacgtcccacatggttcacactcgctaaaaatgtaacgagttcacctacataaataggttctttaaaatttactttgtctacagacaacgttacgacatagctgcctgaataacgacttgcacaagcataggccacttggtctagtaactttagaattgttccaccatgaacattacctgaaaaatttgccatgtccggtgtcattaaaactgacatggttaattctgactgatcgtcagttacggttgtcatttcatctaatgtaggcatgactcaactctgtctcaaacaagctcagaaaacattatggttgataattcacaaaaaaaacatgcttaaatccacaacatagcatcgtattttttaatattgttaattctttttttgaacgaatattttttaagctattatttttaataattttttagtttttcttaaataaacaattattgagcggtcaaaaataatcaaaagatgctatgccattttgttccattttaaatgacacagcatcgttttatatgaggttcactatactttatggatcagtccggtaacgccattaataatcatatcaacagcaatcgtaccgattaataaagcagataaacgcccaacaatatcgaaatagcgatcgatatattttgcatgtttgtaccgcaaatgatcatgtgaaaatttcatcaaaatcaaaatactgcatgttaaaaacatggtaaacccgatcacaagtgccgcagcaccaatcgacatttcaatacctgtcaccacagctgcactaatggtacctggcccaatcataaaaggcatggcgatagtgccagccaaatgttctggtgcaccgcgcatttcaccaatggtatctgcaccctgaaacacatagcggtaaccaatcaccaaaaagataagaccgccaaaaatctggaaagcctcaaagcgtacattcaggtatttactaaagattgcttcaccgccccatgcaaacagcataaagacgatataagcaatcaagctcccctgaattaaagctttgttaaataccttggtttctgaatggcggatgaggccaatcatataaatgctcattaaaaaaggattgagcaaagagaaaaataaagcaaaagaatgcagatatggtgaaaccatgcatattccccttaagcttgtggatctgggaataatggacggttcccagggctaatacgattaatatgcaagaacgtcatatgtctttcatatttatctaaaatgtcattaataacctgttctttactgtaaccaacaaggtcgttgtcttgagaaccttcataaagataggtttcgagacggtaatagaactgtttgcctcgttttacacgctgactaaagttaggcgcgctataacggacaggccaaatctgataaacgaagttttgctcttcttccaaatgaatagtgatatcgaggtgatatagcgcctcttcatcttcaagtggtgtttgctgcacatctacgttcataccttgcttaatgagttcatcggcaacagcttgaacggcaggtttgcaaacggtatcgagcattcgtctggtttcagtcgttcctggatgatgcataacccgagtcaaacgctgtttccaattgagaatatcgacgttacccaccacaggtgccgcgttcatacttcgactggcatgcctgtagtcttcaagtctgagcgacttataaagccccgccatgacaaggaacatcacgaaactaaacggcagtcccataataatggttgcattctgcaaagcggtaatcccattggtcatcagcatagcgagtgttaataacccaatggcaattgcccaaaacacgctcaaccaacgcggcgcatcattatcaatatgggtaagcttggtcgtgaagttacctaaaaccaatgcccccgaatcggcagaagtcacatagaataaaaggcccgttactgttgcgactgaagcaataaaggtaaaacctgggtactgcgctaacaagtcataaaaaccatgtgccggattagataataccgttgcagctaaagtctggttgccttcaaaaataacactgtgcaatgcgctattaccaaaaatggataaccaggttaaggtaaataacagaggaataattaaagtcccgcacacaaactcacgaatagtacggcctctagaaatacgggccaaaaataaccctacaaatggcgaccaagcaatccaccatgcccagaagaacaaggtccagctgctcatccaatctttaggttgctcaaaggcaaaactttgtaaggctaaggttgggaagcgagttaaataatcaccaatattttgtaccagcgcattgagtaaaaactcggtattgcccaagaacaaaataaacagtaaaagaccaatcgatacataaatattgatttcagacaaaatccgaaggcctttatttaccccagatgtcactgaaataatactaataccgactgcaatggcaatgagtgcaaactgcatccagatattctctggcagtcctaataaaacatgtaaaccataattcagctgtaccacgccaatcccgcaggtggtcgcaataccaaaaattgtcccaatgacggcggcagtatctacactatggccaattgccccattaatcctgttcccaaaaattgggtaaagtgcagaacgaatggtaagcggcaagttgtagcgataactgaaataaccaagggccataccaatcaaggcatacatacaccatccggtcaaaccatagtgaaacagcgtccacaccatactttggcgtgccgcttcataggtttggcctactccgacaggcggctgcatataatgagataatggctcagccaccgagaagaacattaaatcgataccaatacctgccgaaaacagcatggcagaccaactcagtaaactaaactcaggctttgagtgtttagggccaagtttaatctcaccataccgtgagcaggcaatgaaaattacaaacaccatatacagcgttgcagccagtaaatagtaccagccaaaggttgacgttacccacgcaaggacggtgttaatggttcgatttgcgaaatcgttaaataaaaaagtaacgagagaaaagattaaaatgattagagctgaaatataaaaaaccacacggttaagcgggtcttttttagatttagataatgttaaatcatcaactgctcttggattatctgttgccatacaatcctcaaggaatagaagaaaaataaaatattcaatttagtcttttcactatttaacaataatgaaaagactgctttgaacgcaaaaaatataaataaatgtgatgaaccaaggttataaaacctcggtcactttgttctggtcacaattcgatggaatagaaatgtcttgtgaaatagctaactgctttttcgcaacattcgggtcaaaatcatcttgctttaaggctttggctagaccaaacatataaagcaaaataatcacagaaaatggtaaaccacataacaccactgcactttgcatggagttaaaactacctgctaataataagccgatacttacaatggtaatgaccacagaccaaaagatgcgtaaccagatcggtgaatcactatcactggtgccccctttcgaggacaaattggcgatcattagtgtaccagacccaaccggtgtcaaaaataaaacgaaacaaattacaacaacaatcccggcaatatacggattaaacgggagatattcgagtaatttgaataatgacaacgcagggtcacttaaaaccatatcacctaaaactttctgtttttgattgagaattaaatgaattgcagtatttccaaaaatcgagatccaagccaaggtaaaacctaatggaatgaggcatacacccaaaaccacttctcgaatagttcggcctttggaaatgcgggcaataaacattcctacaaaaggtgcccaagcaatccaccatgcccaataaaacacagtccatgaacccaaccagccactggctttttgattgtataaatacatatcaaaacttttacccataaaattattaaggtaatcgcccgtattttgcacaagaccatttaacaaatggttcgtcggtcctgttaaaaatacaaataaaagtaaggcatagagcaaacgtaaattaatccgtgataaccatgccaagcctttttcaatcccgaccactgtagtgaccgtcgccacaaacatcatgattaaaactgcagtaattaaagttgcagagttatcaggaatttcaggaattaaataacaaatgcctgaaaccaacactaaagcaccaatacctaagttggtcaccaaagaaattacggtcgctaaaataccaaagccatcgacaaaatcacctaccagaccatgaactcgctctccaaaaattggatagagtgccgagcgtagtgcgagtggtaaatcttgtctaaaggcaaaataacctaatgtcacacccagcaaggcataaagcacccagccatgaataccccagtgcaaaaagctataggtcatggcattgcgggcagcctgaatagtgcctgcctcaccttctggcggtcgtagaaagtggtcaacaggttcagcaacaccataataaagtagcgcgataccaatacctgccgaaaacagcattgaggtccaagccaaatagccaaactcaggtttgtcgtggtcttttcctaaagggatctgtcccactcttgagaaggcaagccaagccacaaagcctaaacacagcacaatcaccaacatgtaataccacccgaaaaagtggtttacctgctcttgcacataggtcagccaaaactgacttttttctggaaacagcacaaataataggccaaaaatgccgatactgactgccgaactccaaaatacaaaacgatttaaccgaatatggtctgaagaatatccatcacttttcaacaccatcttattgctccttgcaatcggtgtattttttccaaaataacgtgataagtaccggacttatgcgcatcatcctatccgtaagaacttctgattctatctcttctaccccgaagtaagattcaaaaattcattgatttttacacatcatacttgttattgattgaacgttcaatcaataacaagtatgataaaaaaagtgctatgatgctctgcaagttaacatgctgaatttaaagcacccataaaagtgctgatgtggacaatcatgacaaaacgcagagtaaaaccagagcatgtgcgccgtgaagagattatgaacgctgcactcgacgtaatttatgaagtggggttatccaataccaccattgcacaaattgcaaaaaaagccgagttgtcgaccggtattgtcagccattattttggcgacaaacaagggttaataaatacctgtatgcaagaaatgctcaatgttttgcgtcggaaaaccgaacagtacagagcagaagcagattcgcatccggaaagccagattaaggcaattattgattctaactttgacattagtcaggtaaatgaaaaagcaatgcgggtctggttagacttttggtctgcaagcatgcatgtaccggacctgagccgtttgcaaaagattaatgatcaacgcctgtattccaacttgaagttttattttctcaagttaatggatgaacaacaggccagtgttgccgcaagaggtctggcagcattgattgatggattatggctacgtggcagtttaagccgtcacaatgaatttgacagcgaactggcccgttccattgcttacgattatgtaaaaacgcaattgcaatttgcgaacaagcctttgcaggagagacaaaatgagtgatgtacaagttcatcaattgtatatccatggacgctacgttgaagcaaccagtggtaaaacatttaatagtattaaccctgccaacggcgaaattatcgcgactcttcaacaggcatctgaacaagatattgaagctgctgtaaaaagtgcccaacaaggacaaaaaatctgggcagccatgaccgctatggagcgttcacgtattttacgccgtgctgtcgatattctccgtgaacgtaatgatgagcttgcccgtcttgaaacactcgacaccggtaaagcctacagcgaaacatctaccgtcgatattgtgactggtgccgatgtactcgaatactacgcaggacttgcaacagctattcagggcgaacaagttccacttcgcgaatcaagtttcttttatacacgccgcgaacctttaggcgtggttgcaggtattggtgcctggaactatccaatccaaatcgctttatggaaatctgcccctgcccttgctgccggcaatgccatgattttcaagccaagcgaaacaaccccacttactgcattaaaacttgcagaaatctatacagaagctggtttaccagacggcgtatttaacgtggtacaaggtgctggtcgtgaaatcggtcaatggctaacagaacatcctgtgattgaaaaaatctcattcacgggtggcgtagaaactggcaaaaaagtgatggcaagcgctgctggctctacactaaaagaagtgactatggagcttggtgggaagtcaccactcattatttgtgaagatgctgaccttaaccgtgccgcagacattgcggttatggcgaacttctttagctcaggtcaagtatgtaccaacggtacgcgcgtatttgttccaaaatcacgtttagctgactttgaaaaagcggttgtagagcgtgtacaacgtattcgcattggtgacccaatggctgaagacacaaacttcggcccgctcactagcttccctcatatggagaaagtgttgtctttcattgagtcaggcaaacaacaaggcgctaaagtattaatcggtggtggtcgtgcgacagaaggcgaacttgccaaaggcgcttatgtactaccgactgtatttagcgactgtactgaccagatggcgattgttcaagaagaaatttttggacctgtcatgagcatcttaagctatgaaaccgaagaagaagtgattcaacgtgccaacgacacgacctttggtttagctgccggtgtggtcactcaagatattagccgcgctcatcgcattattcaccaaattgaagctggtatttgctggattaacacttggggtgaatcacctgccgaaatgccagttggtggctacaagcaatctggtgtgggccgcgaaaatggcttaaccacgcttgggcactatacccgtatcaaatctattcaagttgaacttggcgattatcaaagcattttttaatgcccctatcgctctaaacacttcaacctaaatcacatatgccgagcagtctttatagattgctcaggcaaactgttagtaaaaaaaggatagttatgaatattaaagaatatgattacattattattggcgcaggatctgccggaaatgtactcgctgcgcgtcttactgaagacaaagataccaccgttttactgctagaagcaggtggaccagattatcgcttggatttccgtacacaaatgccggcagctttggcctaccctcttcaaggtcgtcgctataactgggcttatttaactgacccagagccacacatgaacaaccgtcgtatggagtgtggtcgtggtaaaggcttaggtggctcatctttaattaatggtatgtgctatatccgcggtaacgccatggatttagaacaatgggcaacccataaaggccttgaaaactggacttatgccgactgtttgccttactacaaaaaagccgaaactcgtgacattggtggcaacgactatcatggtgatagcggtcctgtatcagtggctacaccaaaaaatggcaacaacgtgctgttccatgccatggttgaagcaggtgtacaggcaggttacccacgtactgacgacttaaacggttatcaacaagaaggttttggtccaatggaccgtaccgttacgcctaaaggccgccgttcaagtaccgcacgtggttatttggatatggcaaaaggtcgtccaaacctgactattttgactcatgcaacgaccaataaaatcttgtttaatcaaaagcaagcgattggtgttgaatacattattggtgctgatcaaaacaacttgcaacgcgctttggttaaacgtgaagtattactgtgtgcaggcgcaattgcgtcaccgcaaattttacagcgttcaggcgtaggtcaaagtaccttcttaaaatcaatggacattgatgtggttcatgatttgccgggcgtgggtgaaaacttgcaagaccacctggaaatgtacttacagtataaatgtaagcaacccgtttctttataccctgctttaaaatggtataaccaacctgccattggtgccgagtggttattcaatggtacaggtattggtgcaagtaaccagtttgaagcgggtggatttatccgtagttcggatgagtttaagtggccaaacattcaataccacttcttgccagtagctattaactacaacggtagtaatgcagtaaaagaacatggcttccaagcacacgtgggttcaatgcgttcgccttcacgcggtcgtatcaaacttaaatcgaaagacccgtttgcgcatccaagtatcttgtttaactacatgtcgactgaacaagactggcgtgagttccgtgatgcaatccgcatcacgcgtgaaatcatgcatcaacctgcgcttgacccatatcgtggtgatgaaattagcccgggcaaacatttgcagacagatgcagagcttgatgactttgttcgtaaccatgcagaaacagcttaccacccgtcttgtagctgtaagatgggcgaagacgaaatggctgttgtagatggtcaaggccgtgtacacggtatgaatggtttgcgtgtagttgatgcctcaattatgccgctgattattaccggtaacttaaatgcaaccaccattatgattgccgagaaaattgcagaccaaattcgtggacgcgaagcgttaccacgttcgactgcaccattctatgtagcatcataaaatcttaaagggcatatttcttatgcaggaatatgcccttaatttattatttatagcactcatattaataagaactatgtatgacagaaaataaggtcatgcaaggttattaattacatcaataggtcataaattaaaaattcacctatttttatcgaagcatatccttcaaatggcttaagtttaaccaaatttattttattaatttattttcaataacttacaataagattaaaactaaaaataatcttattaaagtttaatttgattaaatataaatcatatttatgattttaatagaacccatttattataaaaattgtattgtcaatgcaaaattagtctaaaatatagagtgtttgcgataatcccaagtaatttttcttttttcaaagttctctgttttagagaattttactttcgcatttatatccgttttgtctggatacgctgtctaggtttcctcacaccttaagtgactcaaataacttattttaaggtcccccttacatgaaaaagtttttgaaataccttctggtattaatcattcttattttaattgcgggtattgttttcttgtttagaccgattgcgtcaaaacaagtacaaactgcaaaagatgagccagttgttgatgctgttcttgttggcggcggtatcatgagtgccactctcggtacttatttcactgagcttgaaccgaattggcaaattcgtatgtttgagcgtcttgaccaagttgctcaagaaagttcaaacggctttaacaatgccggaacaggccactctggctttatggaaatgaactataccgaagagaaaaacggtaagatggaaattgccaaagctgaaaaagttgcttctcagtttgaagttgctaaacagttctggtcatatcaggtaaaacaaggcgttttagctgaaccaaaaacattcattaacccagttccacacattgctttcgtttggggcgataacgttaaattcttagaaaaacgttatgctgccatgattcaaagcccgcttttcaaaggcatgaaatttactgaagacccagctgtgattaaacaatgggcacctttagtcatgaccgatcgtgatccaactcaaaaagttgcagcgactcgtatggaagttggttctgacgtgaactatggttcaatcactaaacaattagtgaatcacctaaaccaaaaccctaacttcaaattacagacttcaactgaagtgacaggcatcagccaaaatgatgacaaaacttggacggtgtctttcaaaaatttgaaaactggtaaaacagaccacgttaaaacgcgttttgtatttatcggtgcaggtggtgccgcggttaaattattgcaacttactggtttaccagaagcgaaacaatatgctggcttccctgtaggtggtgagttcttaattactgacaacccagcaattactgctcagcacacagcgaaagtatatggtcgtgcggaacttggtgcgcctccaatgtctgtaccacatattgatacacgttatatcgacggtaaaaaatatgtattgtttggaccatttgcaacgtattcaaacaagttcctaaaaaatggttctcaacttgacttacttgcgtcaacaaacaaaagcaacgttttaccaatgaccactgttggcttggaaaaccttgatcttgttaaatacttggtgagccaagtcatgatgtcagatgaagaccgtctcaatgaacttcgtaaatactacccagatgcgaaagctgaagactggcgtttaagccaaggtggtcaacgtgttcagatcatcaaaaaagaaccaggtaaacctgcaacacttcaatttggtacagaaatctttgcgtctaaagatggtgctgtaactgcattgttaggtgcgtctccgggtgcttcgacttctccatacatcatgcttaacttgcttgaaaaagctttccctcagcaaactgaaggtaagtggaaccagaagcttcatgaaattgtggtttcttataaacaagacttaagcaaagaccctgtgttactcgacaaagttcgtcagtacacaagctctacgcttggcttgaactatacatctccgttcaaagctgcaaacgatgaaactgctgctgcccctgttgcaaaagcaaactaagtttgatgatgtataagtaaaatatcaaaaggatgaatttcgattcgtccttttgttttttaagacttctgttgagatatttagacttgccatgacgcctttaaaatcatcacctcgcctcttaccgttttgttttaagctcgtgcttgttttgctactggcttatcttttgttaagcgggttttatatgtggatgattggcggtacagctatttacgtcagctcagccgtgttatttgtcataacagcttatgcatttaagctcggtaaatatcaaaaactatgtgctgttttaaatgtgctcatgagcgcagccgcactatatttcagcatggctcatctatttttttcccctatccagttctttatatttttacctgcgctattttttgttgtgttggcttttactcaagtaagtaaagttcgtagtttatctaaagtactcatattaattagtttattgatttggtcaggcgtacattttacgcagcttgaacaacttaaagcgtattatcaaacacagcatactggtgaaagctggcagcaatacggcgcgctataagactatttttagtctctatacttcatgaatatctattttctttttcacatgaagttcatcagtaaaactgaacagcatttacagaattccttttaagaaaaaatattcataacaatctaatttatttagaaatatatcgagcatattagcgattgaatagcattcatctacacgctagattagctgaattatttttctccctttacgttgtaatttatgaaaattttagatggcggtttaggccgtgaattggctcgccgtggcgctccgtttcgtcaaccagagtggtctgcgcttgcactcattgaagcacctgaaacagtaaaagaagtccatctcgactttatcaacgctggtgcagaagtcattacaaccaataactatgcggttgtgccatttcatattggtcaggaacgttttgaaactgacggcgtgcgtttaattaaagttgcgattgaacaagcaaaaaatgcagttaaagaaagcggcaaaaatgtcaaaattgcaggctgcttacccccgttatttggttcttaccgcgccgacttgttccaaccgggacaggctaaaaatcttgctgagccaattattaacacattggcaccagaggtagatttctggctcgctgaaacccaatcctgcttaaaagaagttgaaacagtccatgcgttattgccacaagatggtaaggactattgggtgtcatttacgctgcaagatgaaatcaaacaagaacaagcattacttcgctctggcgaaaacatgcaacaagtggctgactttataaagcagtcaaatgccaaagcagtattgtttaactgctgccaacctgaagtgatcttgcaagcaattaatgaaattaaaggactcattccagagtctgtgcaaattggtgcttatgccaacgctttcccaccgcaagatgaaagcgctactgctaacgatggccttgatgaaattcgtaaagacctagatgctccaacttatcttgcttttgccaaacaatggcaacaagcgggtgcaagtttagtgggcggttgctgtggtattggaccagaacacattgctgaactttctcaattttttaaagaataaataccatgtctgctgccaaaatcggattattgtctcttacagcgctggtatttagttctatggtggggtcaggcgtatttagcctcccccaaaatatggctcaagttgccaacggctctgcccttcttgttgcatggctcattaccggagtcggcattattttcttggccctgtcattgttgcatttaactcgtcaacgaccagatctagatggcggtatttataactatgcacgcgaaggctttggagacctcatcgggttttgctcggcgtggggttactggttgtgtactaccattggtattgtcggttatgtagtgattgccttttcaggtgtcggcatgtttaccgacagcaaagaccacgttatttttggtgaaggcaatacgctctactctctgattggatcaagcatttttgtatggctggtgcactggttagtaagccgaggtattaaagaagctgcgattgtgaatttactggcaaccattgccaaaattattccaatggtggtctttatcttctttacttttattgcctttaagtttgatttgttcaaactcaacttaaatgacttctctttaaaagttcccctttggcagcaagtaaaagacctaatgctcattaccctttgggtatttaccggtattgaaggtgcggtggttttatcatcacgtgccaaaaaccgtcatgacattggcaaagcgactattttaggtgttttactggcattaagtttttacgtgatggtgacagtgttggcttatggtgtggtgagccgtgaagcgcttgcgggcatgcataacccatccatggcgaccattttgcagcaactcatcggtctacccggtaccatcattattaccattgggcttattatttcagtttcatcgtcttatttaagctggacgttatttgcgactgaaattccatatctagctgcaaaaaatggtgctttcccgaaactatttttaaagaataaccaaaataatgtgccgatttcatcactatggctgaccactattgtggtgcaaggttctctgattgccgtgtattttttcaataaaaactatacccagcttttattgatttcatcggtgatgattttgctgccttattttctggtatcggcgttttatcttaaagaatcgattcgccacaaacgcacgccgcatattgccattgcaagtgtcgcttcaatctatgcactttggttgctctatgcagcgggtttagacttactgctgttgtctggtgtattgtatttggttggcttggttattttttcaatcagctactttgagcataaaaaatcgctcaaacaaaatcagcttaattaatcatttcaaccactgttgagctatttcagcagtggttttctaaaaacaaaaaaactattttgaaggcggcgactgctttaaatgcaatcgtaaaatacggcgtaattctaaaattgcctcagggctagtttgaatcgaatgcccacctttaataatcagctccgactgctccccacccaaatgtgaactttgatacggcacaatcccatcgctcatttttgacttatctgtcgtaccatttatgttgcccataattgagtgatagaccacgttggacgagggttgaatggcttgggtcaactgcataaagttagaagaacgacttaaattactcgctccattttcaattaagccttttctgagtttggtatttttctcatctctcatttcaacggcaataaaaaagtcggcaggtaagcgaataatacggcgagcaatttgggtaaaccatcggtcagcatagtcagtaccatgatgcggcgccgaaacaaaaacaacccgcttaaaatagggcaaatctttgaactgaaaacgttctcgaataacaggattttcttttaaacgctttagctgtgcttcattcattttttgcatggctaaatcagaaacgtctgcatcgcttactagtaagcggctaatcactccgcccatactatgcccaaccaatacggcatcatgtgcagcgtagctgtctttggcaacgttttgaaaagcctgattcagcaaagaataaatctggaaacgactttcaaaaatcggcatattggttgaataaaacacctgccaaacttggtagttttgtcttaattcggcatcacccataatgtcatttgttaggctcacccatgcctctgggctgcttgccaagccatgaataaacacaataatttttttattggggttaaaaggttccagcatatataaatgcggcataatcaaattggcttctttattaattaaagaccaatagcctgctgcacctaaattatatttcgataaccatagcccataaggcgccgaatagtttgcagtaagtggatagtccacaccttcaacttttacacggtcctgtcggtatgggtcaaacatggcaatttctaactctgccccatcaatgacctgatcggctgtggccttttgttttgggtaagcaatagccgtgactggaaagaaacgtggtaaatgaatgttgggattactctggtaagcataaaaagcatcgggatctaaaataaaaccatgatttacatcatgctccttacgtcccacaataaactccgcacctaaaccatccttacgattgacggtattaaaccctgaaaagttcatgttatagctagagcgaaaggtatcaacttcaatgtattgtacatctacagcatgatcaaagttaacgtggtactcatgcccatctgcttttagtataggtgggaaatgaagcgtatttaaatgattaaaatacgtggtcatgagcttcgacaaggcgacgttataaaaaatacgtacctgattttggcgatggtcaaatacccgatcaaaaggtggctcttcagaatcaaacaaatagacatagctatagcgcaagcttttatcaaacaacgccagctcttgctcaacacaactgttacttttaagagtgacattacactggctactacgcccaacatctaaagcttttgccaaataaatttcactcagcgcagcatagcgttcttctctgctgctattttcggacaggctctgaaccttatttaaacaatcatcaaaattttgtaggcaagttttttcatcttctttgaccaaatacagtaagttttgggtctgatgacttagagtattatcggtcaaaatgctttcatttttactttttaaagcactgcttaagttactttcttttaaatgaatgacctgacaaccgctcagcagtcccattattgtaagcactaaataatggccggattttgtcattgtgcattcctttatcgaatgtatttccccacccatcattatgcctgtaaagctgtgcctgaacaatttcggctcagctttgattggaatttatttggaaaataaaattgaccgtatattttattaagcttgtttaaacttctgctgggaagccaaataagaaaaataaaggataggtaaaataaacggcgctacgctccaaaagtcaaaatagacatagagtaccgcccccattaaagcacctatgacaaagccaatgacaatactggcacttttaagcaaacttgcccgattggcggcattattgtttttaagcaagttggcaatatcaatcccaagctgggtggtgttgcctgtcatcatggtacttgggctaatatttttaataagggttttgcttgatgtattacgaatcgccaaagcaattaaaccgaggccaccagtgattgcaaccgtaatcgaatcggcatttttaaatggctcaaagtaaagcccagcagccataaaagcaaagagaaaaatagcttcaaataaaaataaataagacagcgttttgtgtttggtctgactacggtcaattaaaagtttggtaataaccaccgtcacaataaacaatggaatagccgcaagtttaatccataaaccggcaccacccttcaccaacgcagccccggccaataccaagttgcccgtcacatgagcagtaaaaaaaccaaataacgcgataaagccaatggtatcaattgccccgcccaccatagtcaataaaacaggatctcgacatattacccacgtactttgtgtttcttgttgaattgaagtctctggcataagcagcatcctgttcttttaaagtcattaaattcagtacgaagatgttttaagtatttaaaaacaaatcaaagctaaagcatttatcaaaacaaaaaagtatgtaaaaacatagagtgtttaatgtcgcaacactgtcttcaaaacagcaacaataaaatttgtttatttttaaaacattaaacgcttctcatccgcaaatcaatttgacctctaaaactgttctaactatgatgaagccgcaagtttcgccaatattttgcacaaacggctattgtgctgagtgattgataaagaaaacaacaacgacgagaaggaatatgtctctttataatttttcagtttttttgggtggattgttatttgtatcgattgcctctgccggctataaaagtaatgcacaccgtgacttttactcaaaatgcgtagccgctggacatagtcgcgcgacctgtctgtgtatttatcaccgtttagaacgccaatattccccaaaactcatgcataagcttggaaagttaagtctacaaagcccagaagtgccgcgtgattttgtaaaaaccatgcttcgaacgatgcaacagtgccagtcataaagttacaagtttttttaaagcaaatcagcaagatttctaatttcttccatcaccgctttacacgcaggcgttaaatagccatgtttagaaatagacaaagaaatatagcgcttgagtgctgggttaataatttttgcggcttgaattgaggtgtattggctggctttttttaaagcttgcggccccagcatggtatacatgcgagactcggaaaccaaatgggtttgtaaactaatcgaatcggcttcaaacacaatattcagctctaccccattttcataggccatgtggtctaaaaaattgcgccagttacttggcctgcaaaacgtgaccagcggtaactgacttatctctttaaagtcgacttcactggcctgagtgagcgcatctccttcgctgccgaccaaataggtatcggcttggataaggtaaatatcgccttgtttaggtgtcgggttaaagcgataaagaatagctaaatcaacactgccatcttcgagccatttttctaaatgtaccccttgcccttcacgcactgaaagtttaattaagggatatttttgttgaaggactttatagagagtcgataacaacggatgtgcagtagacggcaaactggcaatacgaaccgtaccaatcggtgtatcggtcgagtgcaaaatttcattattgagttgatcggtcacgttcagccatgaacgaattttaggaagtaaatgctggcctaaatcggtcagctcgacaccacgtccagttcggttaaacaaacgaccaccacattgggcttcaagctcattcatttgccgactgatttgcggttggttggtgttatgcagcatggcgactttgcttaagctaccgagttccaccgcgtctaaaaatattttccataattcataattcatcgattcttcccaaatcgtaaataggcagcattttgagccatacattttcagtataactgaaattcaagaattggtaattcctacatagctcacctatttctatactccaatcatgttctctacaacacgatttaagtcagattaagaaccagagaatatttaattacactgtataggaagtacgattatgagtttagatttacgtggattaaccccagcacctgtgactccttttacccgtgacggacaagtagaccatgatgcaattcaacgtttaggttcatggttaggcagtattgatggtgtgaaaggcttggttgttcttgggcatgcaggtgaaggaacattcttgtctcaaaaagaacaaatgcaggtcatcgaaagctttgttaaatcggtagatgataaaattccggtaatcgcagggattacactcgaaggtacttcggttgcagcagaagaagcaaaacgtgcagtcagcgcaggtgcttcggcaggtttgatttacccttcacatggctggttgcgttttggctatcaaaaaggcgcaccgcaagaccgctataaagcgatttatgaagaaagtggtttgccatctattttattccaatatccagatgccactaaggccacttacgacctagacactttactcgatatttctgcacagccaggtgtgtttgccatgaaaaatggtgtacgtaacatgcgccgttgggatgtcgaaattccaattattcgccgtgaacgtccagacttacaggtgttgacttgccatgatgaatatttgcttcacaccatgtttgatgtagacggcgctttggttggctatggcaacattgcccctgaacttttaattgaaatgattaaagcaggcaaagccaaagattacgctaaagcacgtgcaattcacgaccaattattaccagtaactcgcaatgtttatcaccgcggttcacacatggaaggtacggtcgcacttaaacatgcactggttgctcgcggaattttggaccatgccactgtccgttcgccactgcttccactggcagatggtgctgagcaagaaattcatgatgcaatgcgccaagccggaattggcaaggtcgatttaacccaagccgttgcttaaattctattcgggctagcatatacgctagcctttttttcctgtacgctgcctgaggccaaacatcgggcatgtctcttaaaaacaataataaaaagcatgcaaactgttgtgaacaggtagtgcgaaatagaacaacaaaactacgaggaatgtagtgataaggagatataagatgacaaatctagcggatgtagaacaaattagtcatcatcaaaaaaatgcggaaattattgcaagactcgaacgactacccgtcaccggacgattgcaatttatgcgaattaccattggtatcgcgaccttttttgacgcttatactgttctagcaattgcctttgctttaccccaactcattaccgaatggcacctaacgcctgcctatgtcggcgcgatcattgccgcgggctatgtcggccaactggttggtgcgatcttttttggttctcttgccgaaaaagttggtcgtttaaaagtgctgtcttttaccattttactgtttgtagcaatggacatttcctgtctgtttgcgtggagcggaatgtcgctgttaattttccgtttcttacaaggtgtgggaacaggcggcgaagtacctgttgcgagtgcctatattaatgagtttattggtgcagaaaagcgcggtaagtttttcttgctctatgaagttttattcccacttggtcttatgtttgcaggcatggcggcattttttctgatgccaatttacggctggaaagtcatgtttattgtgggcctaattccctctttactagtcattcctttacggtttttcttgcctgagtcaccacgctggctggcttcaaaaggccgctttaaagaagccgatcaagtggttaaaagctttgaagatggtgccattaaaagcggtaaaactttggctgaacctgtggttaaagaaattaacccgcaaggcatggcaaaaaccgactggcgcgagctgttccgtggcatctaccgcaaacgtacctttaccctgtggggcatgtggttttgcgtgtatatggtgaacaacgccatggtgacttggctgccatctctctacaaacaacactttggtctgtcgctgcaaaccagtttaggttatggctggattacgtcgggcgtgggtgtgattgcctctataatctgtgcattaatgattgataaagtcggccgccgtccttggtacagtgcagcgtttttcttagcaatcattccactcatgagcctctcggttttaggcgcaaaatcggccatgcaagttgtgattttagcaacgctgagctatgccattttgcagaccatttcattctctttatacctttacgctgctgaactttaccctactcgcctacgtgcgatgggcatcgggtttagtaccgcttggttacgcgctggctctgcaattggacctgttatggttggtctggttgttggtggctatggcattcaatatgtgtttagtgtgcttgccgttgtggcgctcattggtggccttgtgactttcttgtttgccattgaaaccaaaggccaagtgctcgaaaaactctctccttaattcatccatttcataaaaagcttgcctaacccagcgttaggcaaagggcttattcatacttaaaaaaggaatttaaaatgaataaatatttgctgtggggctgtattggtttaggcagtgtgagcaatgcgtatgcagagcttcctcaagaatttggcaagttagaattaaaactcaacacccgttattggaacgatgaaggcactgcccaccccacgctcgccaacccttcgccttcgtcgagtgaatatgaacaaagtgccttagggcttgagttaaattatcagtcaccatacatgtgggactggcttggggtggatggttcactctatgcagtcaccaagttgtttgactccggcaagccgagtgctcagcttttagaggtcgaaaataacggcaagctcgaccaaaactttgcgacttttggacagctctatatcaaggcaaaactgggtgatcaaggcgaaattaaattaggccgccagttgcaagactcgctgttacttaaaagcaccaataaccgcgcagtgcccgacactttttcgggtgcgagtgggcagtttcaactaaatgatcagctacagacttacattgcttactatgaccgctggaaaccgcgcagcatggattcttttgaaaaactggtgactgaaaatgacgagcgcattgattatgtcggtttgcttggcgccaaatatcagtacaaaaactggagcgtgaatgccgaatatttaaatagcaaagattatttaaaaaagtacggggcgattgctcaatataaattgccgatgcatggcttggtgtggacatttaacacgggtgcttttttctcgcgtgatgatggcaagctgtttaaatgcggtgccgaaaccgagctggactgtgtcaaaggtcaagacattaacaaccgtggcaatggttactttgtcgatgtaaatgtagccaaaaataatattgaaggtggtattgccatttccaagtttgatggtttttggattgaagataactttgccgtgcactccgaccgcaactcggttttaacgcaagaccacggcactaacccgtttccgacctctgcgaccattggccctgactttaccaataatgatgaaaccgccgttgcccttcgcctgaaatataactggaaagactacgtgaaaggcttaaaaaccgaagcgaagtatatttatggttttggcgctcaccaaagtaatatcagcagtgatattgaaggtaaagagcgttactttgactttacggtaagttatgccttgccgtgggtaaaaaacttagatgtgcgttattcatttttgcattatgagtcaaagtttgaaaatgcaaacctaggtgaaaaaataaatggtatgtctcggaaatattgggaccagcaccgtgtatttattaattaccgttatacattttaagcacaagctaaacgtttagtttagctttattatttttattaatttatagctttagagatattaacttttgagtttaattaaaatataaatttatatttaaaatttttataatattttatttaaattgaattgacctattaaaaacttatgattattatggtctcgctggcctacattgccagtcggttttgacagaccgagtatacagcgtatcaggtacattctctcctgagtatgagacttgtgcgcaacccgcactcccccttaccgttgaggtaggacgggagggggacgcgcttgcgcgtgctggcttgtatgcccagtctgtcaaccctcttccgttctaccaccataatcaattgacggtgatctttggtggtagaactccatatattttaaggagttgaccatgccacgatatatatttatcccctctcccttataaactttttatttatttaaaatttagttttctattatctaaattttcaaatttataaattatttttattttaaaatttaaatcattttattttattgcttttataggcgggttaactattgcctttaaaaatgattttaaaacttaaaatatagcggtttattttttctcattgagatatccccaaatcatcacgagaataatatgaaattttataaaactattttggttttaggcctcgttgtcggcgattacagcgtttcgggttgtgacctccgcacacagcaggaatttgaaaaaatttgcctgtcgggtgggcacactcaagccagttgcgactgtatttaccaacggctcgaacaagtgtattcacctcagcttatgcaacgtctagaacatgtcagtttgcaaagtcctgctctcccacaggactttgcccctactttttttagtgtgatgcggcggtgcgataaaaacgacatgggctaagtgtttggcttagctcccttatctctgtgtcgcaatggtggatgactttaaatcagcgcaaaaaattaaagttctgttgtggcacgggggccttggggggaaatgatttcattacttccttttctaaagattagttcctaccatttgtcttgaagtatctatgttaatcaaaaaatttagtctattctttttacatagaaagaatgctcaaaaaaattaatcagttgatttaaaaaaaattgttcatctaaaatttagtatttctaagcgagccattcctatgtcaattgaagatttctttataaaagattctccctctaagagatatcttttaatgagcttagccctattcatgtcaataatggctttaattgcttactttaagggaaagttgggatttgaatatatattttcccttactgtagggtacgccttaatattttttattttaaaaaatgcagcattaccactttttcccccacttacggaaaaaagtagtgatgcaaatgctatggctagaacaaccatagcaattgtttatatccttgctttgatagctctaactatttcttattctttataattaattactcttcaattttcttgcttcgctctacagtaatatattcatttggaattactaactgcttttcaatatctttcagcttataagaaactaaagtgcttttaccaatgccttgaaataacactttaacatctttaaaaataaaggttttatactgactcagttccttagttgttgttcttggcaattcaattaaatttgcatacggttctttaatatataaggttgccttttctattcgtaccccagtattttgcatagtgtaatttaggaatgctttaccaacatcaccaataaggataaggggcacaagtggagtcaagctaataaaaaaagctatttctaagctatctctaatatgcgtttctaatctctttaatttttttcttgcgaatgctttaagattttcactagcatcaggatcatcaacaatatctgctagattttcaaattttatattaaattctttaatcttctgccgattcatgtaaaaaggataatacgcaaaggcgataaaaaatacggtaattcctatgtataaattgactttccaatgcaataaaaatatgccgtgaataacgtataaaagataaagagagccaattaacgtaataatattaatttttggaaaaggaagttttttcccaattctaatatgaggtggtaaatacttatcaacccagcttaagacaagataggtcactggagctaaggatgtgccaaagaaaaatagcataaaccctaatacagcgtaagcaatagagaacgcagcaaaaatcagtagaaaaataagtgtatcaccaaagctaatttccgacgggatatagccaattgttaaaagataagcaactaagcacaacacccctattgcaactatcgctttagtcattgtcagtgcaacttcatgccactgccccagattatttacacatctcgttatcaagtcgttcatttgatctaaccaaattttataaattatttagaaagagataattacctttttcataaaccgctccccagcggagtaatcgtcttttgaaatttccccaaatttcagagtatgtccccacatactattcagtaatgtcacaaaaaacttatacgttttcaggccatgtattttagcttgtattgcactagtttctactttaaacccatacaaaattaaagttctattgtgatataactgcttgaaaagaataaatggaacaaatacttaaagtatattatggaaatttatttctcaaatttacagatattaagcatttcaaaagtaattaataattctacaaactttcataattacaaatagataaaaataaaaaaatcataccaagctggtctaaatagcagaaaaaaggtcatattcttgaggattttttagtccatcacaaaaaaacattacttctttagctttaattctatgataagcgctataatttaaatcataatcagtcatttgataatttttataaatctcttttatctcatcacaattatcataagaaacgatccatttagatttaattttatctaaagcttctcttattttgacatgatcctcatgaacatagaaatttcgataaaggccttgcccttttacataataaggaggatctaagtaaactaatgaattatcaggtaaaaattcatcaactttctggatcagcatcaaagcatcttcattataaacgtgaattcgggaggcatttgctccaactttttcaatacgtttacttagatttgctttattaaatctagcatcaagggtgtaattaccatcttgcttcttccctccaattacaccacctttaaggatacctgacctatttgtcctattcagaaaaaatgctgcaaaacctttaagtaaatgatcggtacaagaccaatcatttaagatatatttctgtttatgccattcatcaatagttattggtgaatcatgaagtaatttcaaaaaatcatcagtatgttcagttatagatttccagaaactatatacagctatatcaatatcattgatatgtatatctgaaacgaatccactataaagtaaatcaagtgcaacacccgccccacctgcataaggctcaagataatgaccaccttttaatccattaaagttaaaaatagatttcacaacaggagcaaattttccctttcctcctgggtatcttaaaggcgtaaaaaaggtatcaacactcattacttaacaactagatcttttatgcaattctatcatctatacacgcctttaaacacttagatatttacttaatttttaagaagtcttttatactatctttcatagtaggatgattggtacttatcacgtataaaagagttttcttaaaatcttcctgaaaagtattatatttctcaggattataatcaatcatgactctgaaaggattatcactaatctttcctttgattagagattgaataatttcatttttatagaaatttttaaatttttctctcgctttccctcctgactcactactcgaagctcttttctctaaaatgatagtttctaagtcataattttccgtaggagtttggtcaagattaaaaaattccaatattggagaggctattcttaaaaatactggtttagaaaagctaattttattatttttccaatacatatcatcggcaggtaatctataaagaaaatcaaataagagttgatctggaggtagggttcctggaagacaaagagtgtttttgaatttatttccttctttctcgtccccatcaaaaataataatgctatttcttgaaaattcagcaacatttctttttatcaaatccatataacttttacatccaagagtaatttctttcattggatcgataattttattaatatttctttctctaataagagctttaaagaattcataagcctcatcatcttcataataaatgtttgttttaggtatttttttttctacatcaaattgaattgtatcaataaacaaatctgcataaattttatcccaagaataattttcagctacttcaacacctccataagtatcagttaagtaaatagttttattattagatttatcatatttagatttttcaaaaatattttgaattactatcggagaatgagttgtaaaaattatctgtaaattcaatctcttagcaaaactttctagaatttttattaattctacttgtgcagctggaaataagcctgcatcaatttcatcaatcaggagaattccaccatgataatcaacatattcttcttttaatttttgaaatgaaaaaagagccattaagatttgaccagtattatcctctccaaccgaaacagactcatgatcataattatttccatgaactacagcagattcgattgtaccagtcgtttttgatacagtagttccactaattttccctaacaagcgattattagtgatagtgaactctctagaaattcttgtaaaatattctacctcttctgaattaagactatatttacttctctccgcaattggcattaatctttttaaacttagataaataagaggatgagtaacgtttctgctcgagttgtcctcagcatcaacttttaaattatctcttacaactggtcttgattgaggcctatcttcagaaccataaagacgtaattttaaatctggaattatttttttaaaatatgcatcaaagatttcaaactctacatccatagtaccaggtaagtcataagtttttgaaaatctaaaatgttctctaaaactcgatttaaaattcttaccagccaatgtcttaaaattaatatcactaccatcaaaatgatttttatcaaaattaaaaatttgcgcaatcattcctaaaattgttgattttgaagtaccattttttccacaaataactgttaatctatcgccaagatttatctcaatattctttaatccacgaaaatgattaacttttatttttttcaattgagttatatttgaagtcatagtgcaatattagagttacaaacctaacacaatgtaacaaacagtaattaaaaatggaatactaaacaccttagtcaatatataactattcgtcttagtcaccaattatttaataagtatttctaattattatagctaatagctaattttttttaattaattctttgatttaaattatttagattgggtctttaaaatgcttacaactataccctgtaaaagcttgaagtaataaattttaattatcaataattaagctgaatcaagaatggttaaatttaaggaattaaaaaaggcttaaacctcttagatttaagcctttccgctttatacgacatgatattcacttatataaagcttatgtatttggtggagatggcgggagttgaacccgcgtccgccagcactacgctcgagaatactacatgcttagatatcgtctattgttttaacaccaagtgacccgacgaacagggtacaaggtgcgatcctctaagtttggtataaagccccgaggcttgactctatacggacttgtgtgcgtgcgcttcagtcgggttcccagaccacaagtattctaggaagcggacaagcggcccttaggcagctagagcgtaagtttcgtcgtttgcgactatttaaatgcaaattttatttacgagagaaaatgcgctctcggcatgcatctatgagtttcatcaccggcgtcgaagccaataacatccccatgaatgtctgcacatcatagcataattaaaataaaatgctgtgcattttatcaacagtctgccactgatgaacatacttacataattgagtgccttttgtttttttcaaggcccctcataaaaaaagctgccaaaaatgacagcttttttttatgttgggtctataaagcaccattgcctaacacaatcccttcacggcgtgggtctaccccacctgcgtatttactttgattatttatatttactttcataatcgttgaaataccactggtttgcgcagtgttagaaatgccatgcccttttgcttttaagccttcaattaggtcaactaaggaaagctgtacattcgagctatcaatattggtatttttgctattggttgcgccaaagttaacaagcgaagtggcctgctgtgcatttaagttccagtccaatgcacccaccaaggttttaactacatattgaatgatggtaccgccacctggtgagcctgttgccatataaaactcatctggcgtggtgcctttaaatactaaggttggcgccatagtactacgtgggcgtttgccgccttctacacggttggcaactggtgccccagtgctgtcataagggttcgcgctaaagtcagttaactggttcgacagcaagaaaccatccaccatgtggaatgaacccatgctcgattcaacagtcgatgtcattgaaaccacattgccataggcatctacaatcgtgaactgagtcgtgccatgttcaacagtggtatctacacctgccgctgtattgaaattacctgccggtgctacgcccatactttggttcgggttaatcagtgctgcacgctgcttcaagtagtttttatcaataaaacttggaataccctgtgccggcaaacgaacaaagtcggtatctgccacatatttatcacggtcggcgtaggccaaacgctctgcttcagacactaaatgcacgcccatgacatcgggcacaccgccttcattttcagggtttttaggtgggtaaagcgacatatcaaagttttctaaaatacccaacgtctgtgcaaccgcaatccctcccgaagatggaggtggcatggtacatacatagtaacggtcacggtacgtcgtacaaatcgggtcgcgttttttcacctgatagttcgataaatcctgcaaggtcatcaaacttggggtaattggagtttttgctgggtcgtcacccacggtttgccctgcttttgccacaatcgcttgcgcaattggaccagtgtgtagtgcgtttgccccttgtgaagcgagtgcttcgagtgttctggcataggctttattggtcatggtctcgccgactttacgtggtgatccatctgggtagaaataagtcgccattgcatttgcatcgagtgctaaattgcttgcattacttgcaatggcatctgccaaacgccccggtatacggaaaccgttgtcagccaaaccaatggcttcaccaaaaagctgtttccattcaagcttgccatgttctttttgggcttgttccaataaacgcatcacccccggcacaccaatcgagcgaccgctacggcgggcatttggtacaggtggaggtgaatttgggtcatatatattttggcgaattaaataaaattcgttggctgccgctggtgcggtttcacggccatcataagccgtgacttgtttggttttggcatcgtaatacatcataaaaccactaccggcaatggtactcgactgtggctcgaccaaaccaagcacggcttgtactgctacggctgcatcgactgcactaccgcctgcttttaaaacatcacaacctgcttttaccgcaagtggcgtgtttgccaccaccatatatttatctgcgtatttaaccgtgttaccgagtctataacccgatgcaccctcgggcgcggctgggtcaccattttggtttgaaccgaccaccacacttgaaccgtcttgggccagtttgctacaactggtcgggtcattatctacaattaaattgggtggggttgtatttgaatcatccttgggctgatctgacgaggagtcatctccacatccttgtaataaaccgactgctaataaactactgaacaaaaatgaatatcttttattcacgtgataactccaatatatacgcctgcctatccatgcaattgccatgcaagcttctttgttttcaggtcttcagtttttaatctttgataaaaataaagttttaataatattaaatgattaagggtgttgattttgtactctgtgtgatgtctccttgtttgttatcacactcttttataactgatttgcccaattctggcatgctttatttctttaaatacaagcaaaatttcctatttataaactcgctcattttgtagtaggcctaaaaaaagcacctccgaagagatgctttttgatgtttagtgagaaggcataccgctaacctgttttggttttggacacagccaaatgaccagccccgcaaagacaaacacgatcgcaaacagtaaaaacacatggtttgccgacatggtaatggcttctttatcgacaaggtttgaaataatgcctaaagtcgagtcagccgtaaaaccattttgcaaaagtgtgttttgtacttcagtggtatgtaggtttgacaccatttcactacgggcaactttggcgtggtcgtcccacacggtcaccgcaattgaagcgccaatcgcccctgccatggttcttaagaagttcatgaggcccgcagcagatgcaatttcttgctgcaacaccgaacccagtgcaatgttagacagtgggataaagaagaacggtactgcaaaaccttgcaggatttgcggccaagccagtgccataaagtcggcatctgtggtccagaatgcccgcattaaggtcacaatacccagcaaaattaaaccaaagctcgccagcgcacgcgggtcatgtttggtcgaaagttttgccacaatcggtgacatggtcaaactaccaaagcccatggttgcagttaaatatccggcccacgtcgcggtataggaaaggttcatttgcagccactgcggtatcagtacaatactgccaaagaatgcaccaaagccgagcgacaaggccagtaccgaaatggcaaagcccctatgcctaaagactttgacatccaccacggggtgcttatcggtgagttcccatatcaggaacaccacaaagccaatggcggcagttaaagctaaaaccacaatgctggtgctgttaaaccagtcgcgttcatgccccaagtcgagcataagctgtaatgcaccaatccacagaattaatagacctaaaccaacagtgtcgattcttaaagaaatggtttctgtttcagctactcttaacaagcgcattgctgctaatacacagacaataccaaccggtaagttaataaagaagatccagtgccaagacaggttatcactaatcagaccacccaaaattggtcctagaattggtccaacgactgtggtcattgcccataggcccattgcctgcgcatgcttttcttgagggaaaatacgcataagcaaggtttggctaagtggcataagtggaccaccacaaaggccctgcccaatacggaaaaacaccaacatttctaacgatgttgccaaaccgcataggaaagaaaagaccgtaaagccaattaaaccaaagataaagacccgcaccgttccaaagcggcctgccagccaacctgttaaaggtacacaaatcgcttctgcaactgcatatgaagtaacgacccatgtgccttgtgtgcttgaaacagcaaggttaccggtaatatgcggtacagagacgttggcaatggtcgtatcaagtacgaccataaagttcgacaaggcaataacaaacgctgccagtagtaaacggccaccgcttaactcggcaaaaggtgtttgcgttttcataagcgtttacttcgcagataagtcgacttttgcttccatcgacaagccaacacgtaatgggtgttcagcaagttctttcgggtcaagtgcaatacgaaccggtaagcgttgaaccactttaatccagttacctgttgcgttttgagccggaattaaggcaaaggcagagcctgtaccaccagagaagcccaccactttgccgtggtattcaacatcatcaccatataaatctgacgttaatgtgactggctgacctgggcggacttttttcaactgactttctttgaagttagcatctacatataaatcgttaagtggcacaatcatcatcatgcttgtacccggtgcaacgcgttgacccacttgaatattacggcgtgtaatcacaccatcaactggtgcacgaatcacggtacgttccaagtcaagctgagcttgttctacatgcgcttgtgcaacttgtacatccggagtcgaggtttcgcttacaccctgaattaacgcttcgtttgcagctaaggtgctttcggctgccttacgactagaagtcgcttgtgcaaggccggctttagcaagctctagccctgctttagcagtttcaaccgcactttgtgctttggtgagttcttctttagacacggcgccagaggcagcaagctgtgcacggcggttcagttctaaagcagctttgtcatagtcggcctgtgcttgagcaacctgtgctttagcactgttaatttcgtcagcacgaaccaccacttgagagtttaaagaactactgtttgccgcagtttgtttatattggcgttttgctttggcaagctctgcctcggcttgtgccaacgcgattttggcatcacgatcatcaatacgaaccagcacatcaccgcggtgtactgtttgagtatcttttaccaaaacctgagcgacctgtccgctaaccattgaggtaatttgcgcggtttctgcaccgacataagcattatccgtactcaccgagtgatttaaaaataatgcccagattgcatataaaatagcggcgatcaataaaatcagcgcaaagaaaccaagaaattttttgcgcttgttttgcatgttgtcatccgaggcagatgttgttggcactgtttcttgtacattgctttgtgcatcagtcatggtatgttcctaaagatgagttggctttgccatcaatctcgcactacaccttgttatagagtttttatttttctataaacaagacataccgcattgtcaaaggagacaattttaacgctaaaacctcatgatatgagaataaaaaaatataactaatgcgttcgttctaattaaattaatgtttatctcaaagtttttgtgaaatttttatcttttttaatatgaaaaaaagcgccctgagcgctttttaaatgcttaaaatgcctagattaataggcatatgaggcaataccggcagcaatggctttatcttcatcattgaccatggtcatgcgcatggtacagcccttacggcctaaacgtaggacttcggcacgtgcaataaaatatttaccacgccccggtgccaaataatctacacgcatatcgacagttgccaagcgtgtaacctgtttaatggtttcaggcagggtttcgggggttgaacggcgatagagatgttccattgccacaattccaccaatgctatcgagcaaagttgcagccacaccaccatgcaaaacctgaaaagccaaattgccaatgaggtcaggttgcatttcaacatagccttcaatgtgcccatctaccacacgcataatcattccactatgcttaaaaaatggacagctattaaacgccttacacaattggttgagaaccacatttaggtcggtttttgcgcctaattgtatgttccccgtccaatttttcttttcatcactcatacgttgcctaaatttaaaagcatgataaacacccataattttgtacaaatccagcattatggggctacaatacagcagtcggttgacagtaatggaatatccgccaacctatcctagtgtaataccgaacatcgagattgttatgacttatacgttcaatcgtcctgcatttccagctactcgcatgcgccgtatccgtaaaaatgaccagttgcgtgcgatggtcagcgaaacacagctcactaccaatcacttgatttatccagtatttgtattaccgggacaaaatcaaacccaagatattccaagtatgccaaacattcagcgtttgtcggcagatttattactgaaaaaagctgaaagacttctggaattaggtgtatccaaactggctcttttccctgtaacacctcaagaagataaaagccttaccgcagaagctgcatggcgtgaagatggtttagttcaaaccacctgccgtttgcttaaaaaagaattgccagaaatggtgttaatcaccgatggtgccctcgacccatacacgactcatggtcaagacggcattattgatgaaactggctatgtgctcaatgacgagactgtagaatgcttgattaaacaagcattaagtcacgctgaagctggtgccgaagtgattgcaccaagtgacatgatggatggccgtattggcgcgattcgtcaggctttagaagccaatggtcacatctataccaacatcatggcctactctgcgaaatatgcgtctagcttctatggtccgttccgcgatgctgttggctctgcatccaacctcaaaggtggtaataaatataactaccagatggattttgccaaccgtgccgaagcattacatgaaatcgcgcttgatattcaagaaggcgccgacatggtgattgtaaaaccgggcatgccatatctggatgtggtacgtgaagtgaaagatacctttggtattccgacattcatttaccaagtgagtggcgaatacgcaatgttagctggcgcaattcaaaatggctggttatcagactcagtgattttagaatcgctcatgtgctgccgccgcgctggtgcagacggaatctggacttactttgcagaaaccgctgctgaaaaactcaaggaaatgaactaagttcgcagagaaaggataacactgcatgcatattgcaatcattggcgcgggcataagtggattaatgtctgcgctggagttggttgaacaaggctgtaccatcagcatttttgatcaacaacaagcgggacaagcagcctcttgggctggtggaggcattctctctccgatgtacccgtggcgctatgtgcatgcagtgaaccaacttgcccaatttggcaaagcctcttatcaagcatggaaccaaaagctctaccctgttacaggaattgattttgaaattcatgacacaggcatgctgatttttgatgaagaagattttgacgtcgggctttcctacgccgagcagcatcaagaaccgatgcagcgctgtgaatatttacaaagagatgccttagaacaagttaatccgcatatttccgaacaatttcaagaagccatttacttccctgaactgtctaatattcgcaatccacgtgtattacagtccctgattagctatttaaaacaacatccaaatgttgagttttttgaaaacactcctgttaaaaaactgattcaacaaggtgatgccatacaagcactccaaaccgaagatggtcgcaaacatacagcagaccattttgtaataacttcaggcgcttggagtcattattggaactcacaattacaactcgacattccagtcgaacctgtgcaaggtcagatgctgttatttaaaacccctgctcactggctaccgaccatgtgtatgaatcgagtcatgtatttgattccacgtatggacggtcatatcgtgtgcggttctagcatggcacatcgtggttttgacacctctaccgatgaaactacgcagcacaatattttagaagcgtgtttagaaatggtacctgaactggccgatttcccgattgtacatcgctgggcaggactcagaccaagttcaccaaatggcgttccgtacattggcaaaatgcctgaaatggataacctgtgggcaaactttggtcactttagaaatggtttgtgtatgggcgcaggttctgcgcaattgcttcgtcagcttatgctaggtcaaccagccttagttgatgccaaagcatattcaccagagcgcttgcaaaataaaatcttagcctgaggcgagtatattttctaaagccatttttaattgaggataagcaaactcaaatccttctgcttgtaaggctgcgggtttgacgtattgcccatttaagatcaattgcgactgctctcctaacaaacagcgaaaaactgtactaggcgccgacaacattggtttcttattcaaaactttggcagcttgttcaacaaataccttttgggtcacattttctggcgccaccacattatgaatttgagctgattgaggatgctgaaatataaactcaattgcgtttaatacgtcttcaatatgtacccaaaccacaggttgacggccatgaccaatttgaccgactaaattgagtcgaataggaagcaacattttaggcaagatgccgccaccctgcccaaacacaacgcctaaacgaataattttagtattttgctgaggatctgctaacgctgcgagttcccactcttggcaaagctgagacataaaaataggctgtggcgaactttgttcagtgcacacctctgcccatttttcttgagcatctattccgtaataaccaattgcagaaccagacacaattacttccggaaaaatttgagattgcttgagccatacatacaattttcgggtcgtatttacacggcttttaatgagttgttttttacgtgactcggtccagcgtttctcaccaatatttgcaccggccaaattcaccacataatcaatttgacggatcgaaatatcttcgaacttttgtacccactgcaaggcaggatggtcagatttctttccagcctgccgtgtcacagcaatcacgttataatttttttgtagcaggaacctaattaaatgcgttccaataaagccactggcacctgtgattaatacattcttattcatatttcctccaaaaccgaggacagcagttttttaattaatatagttataaaatttaataacgatctaatcgtatcagtttttgtggtgagttatgacacattaaacattttgtttgccatacgctgtgcctgttttccataaaaccagtaggtaattaaataaagcggaatagctaacattaaaagcataatcaccataatgcttaagaactgaggctgtttgaggtaaagcataaagttttgcaaaatctcagggtcttttcttgaaaataaaaacagaccaaataaaacaccacacaagttatagccccaaaatatgagggtaaaacctaaagtaaatttctttttttctggtactgtcggtgcacggcgttctttctttaaaaatctaaataagacaaaaatcattgcgcctaaatatggaacggctgttaaaataccgcctacactcgctggtaatagtgctgcaatcacaccgacaattaaagtaagcacgatgcataaagcaaaaaaccagagaaagtaagaacgtaatttggtcatatttttgcctaatttatgggtttaaaaaataattataaatttttttcgattttttttcatttttctgtcaaccaatcctgatctcttgacgttatatagggtaacaaggtcgcagcaaccgaatacttcctttgcacggcatccgcaaaattgtttcggtgacctttcattacgactctttcttccttcggattaggttttgttagcagccgaaacccttgatgaagtttttgaccgacgattctctcatcactcgaatcgtcggtttttattttctagtactttcatttattttacgctcaccatacacaatagtgctttcgtggctataaaggctatgcgtatactttttacaccataaaaatatgatttaaataatatgaacaatattgcctattttgaaatccagtcttcaaaccctgcccgcgatgcgcagttttatcaagctgtgtttggttggcaatttaaactcgatgaaagcttacctattgaatattaccgcatagaaacaccttcgattatgggtggactattaaaacgccctgctcaaacaccgccaatggaatatggcaccaatgcatttacctgttcggttcaggtggaaaacttcgatgaagtggctgcaaaaattttagcgcaaggtggcattgtggcaatggataaattcgctattccgggccgcgcttggcatggttactttgtcgatttagaccacaacgtttttggtatttttcaagtcgatgaaaatgcaacttaaagattttatttagcctatttattttaatttatagccaccgcttttatcggtggctatttcatatgaattattcagcaaagctaaagctggcttcacatgtaattggaaaatttaccgaattggcaatcatacattcatgatgtgcttcttcatgcagttttgctgcaagctcttggtcagcacctttttctaaaacaacctcgggccttaaaataatttgggtaaaatgaccacgtttgaccggatctgtatcttccataaatcccagtgcatgatcgatataactcacaacgtgaatatggttgactgcacataggtgcaaataccaaagcttatgacaagctgaagctgacgcgaccaataaatcttctgggttccatctggtcacatcgcctaaataggtagggtctgatgaaccttgaatagtggtcttttgaggatgctgaatactaaagtctcgtttatatgaacgataagatgaagtgcctgtacccgtattgccttcccactgtatttttacttcgtatttatgaatagccattttgttctcaaagttcatggtttgacctgatagtaacaaagcagagcttaaggagacaaaataattcagatttcattgctggcttaaataacgaacactttaaaatgtcttgataaaatctcctgccaatttatgctaacgtatctgtgtttatcttggcttgatgtctgtttctatgtccgtacattttctacatacttctgactggcatttggggcagtttttttataatcactcacgacactacgaacaccaacaatttttaagctggttgctcactcaaattcaagaaaaacaaccacatgccctgcttattgctggcgatatttttgatgtcattaacccgggttcacaagcacaaaaacaactctaccaatttttagcagatgcccatcgtattgcaccgcacatgcaaacactcatgattgcgggtaaccatgactcaggctaccgtattgaacaggttgaaccgcttttagaaaaatacaatgcaaaaaccgtaggtgtggttcgctggaatgaagataaaaccctagacctcgatcgactgcttttacctatttataatcaaaatcaagatattgtggcgtggtgccttgccctgccttttttacgttcggctgaaattactggctttaacgaacataccaccaatagcaaaaatgcgattgcctatttgcaccagcaactcattgccgaagccaaacgtcgcaagacaccggaccaagcgcttattttgatgtcgcatgcacatatgcaaggtggagaaacatctgactctgaacgtccaattattattggtaatgaagaggcactttcgacgactttatttgaagatgctgtcgactatgtcgctttaggacatctacataaaccacaaaaagtaggtcagccacacattcgttatagcggttcacccattccgctttcttttagcgaaattaactataaacaccaagtagttgaggtcaaaatcgacccttctcaagacactgacagccgtttgcaatttgaagctgtcgaaattccgcgttgcatacaattgcaccgcattcgtggtgagctaaacgaagtgctgcaacaactcaaagccttgcctcacggtgtgattgaaaatattgaccaccgtgaatatgtcgatattgaatattatagtttaacgccgccacagccaaatttacgtcagcagtttgaagcagctctgccacctgaccgctatcgtttagtgcgtatttcacgtcaatacgtgaacaaagacacgactaattcaaatactacccagcacattgctcttgagccaccaacaccagaaaaactctttcaaaatatttgggaaaaacaaggttacagcgccgatgatgcggtcttaaaagattttctgagtctggtacaagaagcacaaaaacatcttgaaaatgatgcaagccattaaggatatgtcatgaaaattttatccattcgaataaaaaatctggcatcgcttgctgatgaacattttattgactttgaaagcgcacctctggcccatgcaggtctcattgcaattgtggggaaaactggcgcaggtaaatcgaccattttagatgccatgtgtctggctttgtttaatcgggttcctcgccttaaagacagtgatggtaagttaaaagatgttgatggttccgagttactgaccaattcgcctttaactgttttacgccgtggtacaggacatggttttgctgagctttgctttattgcgcaagatcaaaagcgctatttggctcgttgggaaattaaacgtgcacgtgaaaacccaaatggtaaattgcaaagtgtgcagcgccacttaaaatgcttgaccgctggtgtcgtgcttgccgacaaagccaaagcagttgatgaaaaagttaaacaaattacccagctttcatttgagcagtttactcgtgctgtattacttgcccagtcagaagtcactgcatttttaaaagctcgagacagtgaacgtggtgaattacttgagtacctgaccaactccagcattttcgccaaaatcggtgaactggcttttcgtaaaacagctgatattgcaaagcagcgtaaacagctggaagagttcttaggccatattgaaattttgtctgatgaagagattgctgcatttaccgagcaataccagcaagccgaacaaaactatcaacagttagaacagcaaaaacatgtcttagacaaacagcaacaatggtttgaacgcaaagcaaaacttgagcaagaagttcaagcgaaacagcaacagtttcaaacccagcaaaatcaccatcaacaactggctagtgaacgtgagcaattaaaacgactcgaaattttctctgaaatacgcccacaagtttttcagcaagctcaaaatttacagaccctacaacaacttgagccgcaaattcagcaagctcaaaccaagtttaatgagttggtgcaaatttttgaaacgggacaaaaacaatatcaacttgcagaacaacagctcaaacaaacactcgattttgagcaacagcatcaacatgctttaaatcaagttcgacagtccattcaagaacgcgcttttattgccgatgaatataaaaagtgcaaagaaaaaagacaggtacttgagcaaaacctaagcccactacaacagcagcgaaacgctgtacaacagcatattgcacagcttgagcagaacaaaattcatctacaacagcagctgatccagactcagcaatatgctgcattagataagggcctttcagcacatctacatcagcttgggcaatttattcaaaactatgaagcgattgaacaacagattggaaaccctacccttgctcgccaaaagctatcggaagctaaaagtgaacttgaacaactcacagtttcactaggcaccgttgaacagattgagttaaagcttgaacaacagcgtaaagataaagatcagaaacttgctcaagtcacgcagttagatctgattcaacagaaaataaaaatttatcatgagctatatgctgagcttcagcaattcaccgaaaaacatactcaagcctccgcgcaagaagagcagcttaaaaccgtttgccagttagctgaacaagactaccaaacagcaaaaactgaacgtgaaaagttacagcacatcctgcaacagcaacgtttactacacaccgaaaatattgaacagttacgtgccaatcttaaagaaggtgaagcgtgtttggtctgtggaagcacccatcacccttatcgtattgatgacagtgcgatatccaaggccttgttcgatttgcagcaacagcaagagcaacaagctattgcactcgagcaaactaagtttaatgcatggcaaacccagcaacatgcacttactcagtgccgggccgagcttgaacaagttcagaaatacctagctcaactgcaagtaaaacagacgcacttacagcaagaacttgagcaaacgtttaacctcaatcaattacacattgagcttaatcaagctcctgaacaaatcttacaaacacttaatgagctgagacaagcgacacaaactgccataagtttatttgactcagaaaatgtgcgtttaacccaagccattaaacaacacaatcagcttattcaaactattcagcgtaatgaaagtttgcttaatacagcacagcaatggcaacaacaagttcaacatattgtcgagtgtttatcggaaaccgaacagcacgcatggcagcaagcaagtagccaaacagctaagcagacttgggctattcttgatgcacgtgctaagcaacttgaacaacaagaacagctttcacagcgttttgaacaacagcagcaagaacttaaaatgctgtctgctagccttgagcaaatgaccaagcaaattgatgagatcgatcaaaatctccaagagattacgcttaaaggccaacaaaataatgaaaaagcggtatcgctcattcagcaaatgacgggccgttcggatattaagccgcatgaatggttaattgagcacgacgctaaacgtcagcaccaacaaacggcgtatcatgaggctaaacaacgtttcgaacaaaccagacaaaactttgagcagcaaaaacaggcgctcgatcaacttaaacatcagtatcaacacacagaacaacatcaacagcagcttgatgggcaaattcaaaactggttaaaagcccatactgattttcaggcatctgatcttacagcactcatacagattaattcagttcaagagcaagatattcgtaaccgtcttaatcatgctgagcgtttattaagtgaagcctcttctgcccttaaaacgatgcaagagcaattaagcgagcacttacaaactcagccaaatattgaatacgaaaagctcgttaccctcattcaagacaatattgcaaagctcaaagcacaacttgaagtgcgtgacgggctaaagctgaagcttgaattacatcagcaaaaccttgcaaaacagcaaaaatacgccgagcaaattcaaaatattcaacaagaagaacatcgctggagcaaaatttcaggcttgattggtgatgccaaaggtaaagagttccgtgactatgctcagcaatatcacctagatattttagttgaacatgccaaccaacaactggcgatgctttctcagcgttatacgctaaaacgtcttgatcagtcattaagtcttgccattattgaccacgacatggatggagaaacccgctcagttgcctctttatctgggggtgagtcattcttaactgcccttgccttgtctttagcgattgccaatatggcatcgggttcaatgaaaattgaatcactgtttattgatgaaggttttggtacattagatgcctcatctttgcatatggtcatgaatgctttggaccaattgcaaaatcagggacgtcaagtcattctcatctcacatattcaagaaatgcatgaacgcattcctgtacaaattcaagtgaaaccacttggcgctggtgcaagtaccattgaaatagtgggttaaaaactaaaaagccccgacatcctgtcggggcttttttagattctgcgttggtatgactcctgtcgtacctgtctgcatccattcatgactttttattgttattcttagaaacatcctgtttcctaatgagttcatagtacaaaaaaagcatggtctgccatagccgcaaaaggccgcaatttctgtaagaaatcgcttacatcagcctttttgcgaatagtctctagccccaaataaagctgtgcctacacgtaccattgttgaaccagcggcaattgcggcttctaaatcactcgacattcccatactcaatgtatcccagtcttctgggtgagcatgttggacttttaccgcatcaaataattttttggcatctgcaaaagcacctgtattgtcaggagccggaatcaccattaaaccacgtaacttgattttcggtagttgactcatttgagcaaccaactcggcaacgtcttccggtgcacaaccatccttactctcttgcccatcaatattgacttgcaaacaaatattaagtgcagcttggtcatcaccacgttggttagataggcgttctgcaataattaaacgatctactccatgaacccaatcaaacttctcggccaaatgcttagttttattccgctgaacatgaccaatgaaatgccattcaatatccaaatcctgtaaagcatcaattttatctaaagcttcttgcaaataattttcgccgaatgccctttgccctgctgcatacatttcacgcaatctttcactcggatgagttttcgatacggctaaaagttgcacggtttcaggcgcacgctgagcaagttcacaagctgttctgatttgctgtaatacgtgctgtcgcgcatcttgcaggtaattcattgacaaggttctcattttcaaaaaacttttttgcttttcacctaaagtgaggtgttggtaagcctcggtgaaagccgtatattattctacaaaataatgacatattttgatttacttggggaaattatggatattacagagctactcgccttctctgtgaaaaatggcgcgtccgatttacatctttctgctggcatgccaccaatgattcgtgttgacggtgaagttcgtcgtattaacttaccagctctagaacataaagatgtccaccgtcttgtttacgacatcatgaatgataaacagcgccgtgactatgaagaaaaactcgaaactgacttttcttttgaagtacctaatgttgcgcgtttccgtgttaacgcatttaaccaaaaccgtggtgccggtgcagtatttcgtaccattccatctaaagtcctcaccatggaagatctaggtctaggacaaatctttaaagatatttgcgactatcctcgtggcattgtactggtgacaggaccaacaggttcaggtaaatcaactacgcttgcagcgatgctcgattatattaacgaaaaccgctatgaccatattttaacggtggaagatccaatcgaatttgtacaccagtctaagaaatgtctcattaaccagcgtgaagtgcatcgtgacacacacggctttaatgaagcacttcgctcagcactgcgtgaagaccctgatattattttggtcggtgagatgcgtgaccttgaaactattcgcttggcattaaccgctgccgaaacaggtcacttggtgtttggtacactacacaccacgtcggcagcaaaaaccattgaccgtgtgattgacgtattccctgccgaagaaaaagacatggttcgtgccatgctgtcagaatctttacaagcggttatttcacaaaccctgcttaaaaagaatggtggtggccgtgtcgcagcacatgagatcatgattggtattccggctattcgtaacttaattcgtgaaaacaaagtcgcacaaatgtactcagccattcaaactggtgcaaatcatggcatgaccaccctcgaccaaagcttaaaaggcttagtcgctcgcggtgtgattagcccacaaaccgcacgtactgcggcaaaacagcctgaatccttcctataaaaataacaaaatagcgagaatacaattatggattttaatgacttgctcaacctgatggttgaaaaaaaatcttccgatctctttattacagatggcgttgcgccctctatgaagattaacgggcaaattgttccaatttcaaaaaacagtctttctggggaagtgattggtcaactgttacattccatcatgagtgaaaaacaacgcagagaatttgcagaaactcgtgaatgtaactttgccattatgaaccgtgaaaaaacggcgcgttttcgtgtcagtgcttttcagcagcgcgacatgccgggcatggtactacgtcgtattgaaaccaagattccttcaattgatgacttgcagttaccgcctgtacttaaagatttatcgatgaccaaacgcggcattattatttttgtaggcgcgacaggcacaggtaaatctacttcactggcttcaatgatcagccatcgtaaccataactctaagggccatatcattaccattgaagacccgattgagtttattcacgaacatgcaggttgcatcattactcagcgtgaagtcgggatcgataccgactcatttgaaattgccttgaaaaatacactacgacaagcgccggatgtgatcttaattggtgagatccgttctcgtgaagtcatggactacgcgattggctttgctgaaacaggccatcttgtattagctaccatgcacgctaacaacgccaaccaagcgctcgaccgtattattcacttttttgaaagtgaccgtcatagtcagctttacatggacttgtcacttaacttaaaggcaatgattgcgcagcagctcattccaacaccagatggtaattcacgccgtgcagcaattgagattttaattaactcaccattaatttcagactacatccgtaaaggtgaaattcatgaaattaaagatttgatgaaacgctcacgtgaacttggtatgcagacctttgaccaagctttatttgatttatataaagctggtcaaattacctacaaagatgcacttaaacatgctgactcaccgaacgatttacgtttaaccattaaacttgcagatgaaggtcctgatcaattatcagacgggaaacagcatttaacttttgaccgccagtaatttcttcataaaaaaaggaaggttaaacgtaaccttccttttttatttgttttctttatgtgaaaacgattatttcttgcgcaatgcttcctgacattcaggttcattacagtaaccatagagatttaatgagtgacccgttaaggtaaacccatgttgttctgctacagaatgctgttctttctcgataacatcattagtaaattcaatgactttgttacagttttggcatactaagtgatcgtgatgatcttcttgcatgatttcgaaaacagaatggttattttcaaaatgatgacgttgaataatacccgcagcttcaaattgtgttaacacacggtaaactgttgcaagtccgacatcttccccttgctctaacaaagtcttgtaaatatcttcggcgctaagatgatgttgttttgaattttctaataattccaaaatcttaattcgtggaagggtaactttaagtccagctttgcgcaaatcttgattggaaataggcatgaaaaaaggtctctcaacaaatctcaagttggaataggcaatagaatttagatgaagtatgatctatcctttgatcaaatgcatcataatttattgggatagtgtagcaaaatgcaaaaactcgtgctgacgttattcgtcacttcactcctagctggttgttcaatctttggtgtatataaggttgatattcctcaagggactccattgactaaagctcaagcctctcaagtacaggtcggcatgaatttccagcaagtgcgctttttgcttggtagcccaacagtgactgatcccctcaatccacaacgttgggactatatctacaactatatcccgggaacatatgctaaaaaagcgaaaatccccgcagcacatggtcagcatttaaaaatttactttgatggaactggaaccgtaactaaaattgaaggtttagagactattccagaatcgcaaccaggtttacctgcttccaaagaagcaattttaactgccccaccactataatcgttttttctaataaaaagaaacccctctagtgaaatacttgaggggttttgcttattgagctgattgcttaaagcgattgcctttaatgtatctgcctacagggtttttcgcagcacgtttccggcgaatatcttttggattaatcattaatggtcgataaacctcaactcgatcacccgcatgtactaccgcatcagtttctacttttactccaaaaatgccgagctgaagtggttcaggcaaatcaacttgatttgataaaccacttgcttgaactgcctgtgcagcagtcattccctcttcaaatggaacagaaattaaaaactgttgttccggtaccgcaaaagcgacccaaacttgttgtgtgcgttccattagatactttgtccaattacagcaatcattgccacaataattgaaagcggcaatacgatacgtacagcaatacgccataagttataaaaaagctcattgctgaaattcatcgatttacgcaagtggctaattttcataatccaacctgcaaaaattgcatagattaagcaaataagtaagccccacagcataagaatgagcgtgaataaattatgaacttccggcacagcccaaactacaattgctacaacaataatcacccattgtaaaacaggcataagctgacgctgagcaagttgttctctagccaactgcacaaataacgcggatgtcattacaccagtaaatatccacgttaaaacgggtaattgagcctgaagcgagaaaaagccaaaagcaaccacagcaatgagctgagctaaccaaattggaagaacagtttttgttgctccttcttgcgcctgaacagcacctacactattttgccagtaaagccctaaacctaacccgctcgcgacaagtgcaagtacagttgcattaccccactccttaaactcaacactggtccaatgccaaggttgtaaagtcgagcccatcatatttgccaacacaatagaagcgattactcctaaggtcattaataaaatgagtatttggcgtggaataaaagataataccaaggcagcaactgcaaggcctgcaaaaataatttgacccgaaatgcttggggcaaactgtgcaactaatatattgctcgcagtacttagaacgttacccgctaagaaaggaataaaaacaacagcaagccagccaaccacacgccatttaggggaactatcagcttcacgagttaaactcgataacgcatttaaagcggttgtttttgatcgttttgctaaagcaatttccaaataacaaactggtaatgccaataacaacatagtgccaaaccacaataaccagaaatcgatttgacgatcaatctggattcccatggtgggtgccaaagtggccatgatgacaaaagataagcaaaacgccataagaggcgataaccatcgtgacataggtatgtcctgcattatgcattccttgaaaaagtctatagatattttgcccgtctcatgcatgaaaatcaaagtttgcacaataaaaaaagcaaaccaccgaaacgatagtttgccgcgctaactgtatattagagtttttttagttaaggttatgagaaaaaacgggcgaaccagttctttcctttcttcttttctttttctctaataatccccatcatattttcttttactgcccccacataatcggcatcatcatgttgaatatggttaattaaccatttagccaagatctcttgtaattctgcttcaatcgtatggcccatttcaaaacgttcacgatataactctatttttttaataaataagtcatgtacacgtttatgaggcactctatatttataatccgcttcctcttgtaaactttcttcaaaggtaaaatgtgattgtgtataatcaataatattgtctaagacatctttaatacgacgtctatcctcatcatcttttacatcatcaatctcattaatataatccagtattcgtttatgttgctcatcaataacgtcaataccagtattatattctgaagcccatttcattttcatacatcacccccaatgatgttcaatgactgttgcataaaccgcatcttatctttaaagggtataaataaaaacaaagctattttgtcggctttaaataaataaaaatgaataaatagttaagattttgatttttaaaaaattaattaatattaaccaactaaaaagataaagtattttttaaacaaaatactttattattaaataaacaaaaatatatatttcttaagaaattacatttctttcaataaaaaattaatattggtcagcacgagtaatacgcttaagttcaggatttttctcttcacgtattaatctttcaacttgagtaatcgctttttttataggtttaccatgttgaaataaaatcatttcaccaggttgataagcaatccatgtttcattatgagttaaaggctcagtggtaattactgcaactcgatcttcaggagtggttacctgactaaaatcaacctcaacatctaaatcaattaaatgtgcattattgaatggatattctcgaactaaccaatgtaatttagtaatcgcataactaaataaagcttgcccattcgataaacagaaattaaatgtcccatattctgcaattttaggagaaatcttttctaatacttcaaatatctgctcaagcgttggttcttcataaccaaatacttctaccagttgatctaataaataacaaaatgctctttcgctatcggtatttcctaccggcgtaaaacgtccgcttaagggtggattaaaatcatgtaaatcgccattatgggcaaaaatccagtgacgtccccataactcccgaataaaaggatgtgagttctcaagcgtaattttgccttgagtcgccttacgaatatgtgcgattacattacgtgatttaatgggataattacgaataagatcagcaattggtgattcaactgcagactggttatctacaaataaacggcatgccttatcttcaaaaaaggcaataccaaaaccatcactatggtcagaggtaattcctgcgcgttgtgaaaaaccacggaaagaaaaagtgatatccgttggtgttgcacaattcattcctaatagctggcacatattgtttttaaactttcacttcattaccccatgcgtactattgtgcatgagagtaaattggcttgtaaatcccaatatgcgctcgctattacaaaatataagataactttatcgctgagccattttgttcattacaaacgaagtggcaattttattcacttctaaaaatacaaagtaatcgagacagttaaattcagcatcaaagaaggcatctttggataatttagactgcatactcaaatacatttggaatagtttcggcatccgctcgtcttgagggaaactaaactccggatattcaggttcatagatttttttagaacgaatatcgatggttttagtgtccggtaattgctgaatttgacggtgtgtatagtacgctctagccaaattatcttgcagatgaatactgacacatcccatcaaatatttagcgcgcattgaccacaatactttaggtgcaagattcagccataatgttgaaagtgccttaccattacgaaaacgtggatgcacacaagtacgccctatctctaatacatttggcaaatgtgacaagtgtgggacaatatcaaactcattagcactgtaactttgccctatttcatggccttggaagagcttaagtcgtgtataagcaactatctctcctgtccatttttctcttaatacagcatgctcacagccaaaatcgtaaatatcttgatctaaattatcttcaaactgaatgccgaattgtttactaaattgttgtgcacgaaaccgttgtacatcttgtaattcttttaaattatcaacccattcaaagcggaattgtgtttgattgttagccttatggcgatttaaaggtaaagtccaggtttggcgatattgattaaatttttccagcataatgaacgctcctagtgacacccactacactagtcaaagctcatgacaaaaaaatgaccaaaattaaatgacataaaaaaagaccacttagcgtgatcttttaataaaaaataataaggtttagtgagttgtttgtgtacggttagaaataagcgtaccaaccccgtgatctgtaaagatttcaagtagtgttgcgtgcggtacacgaccgtcaacaatatgtgcgctcacaacaccaccttttacagcgtcaagggcacagcctactttaggaatcattccaccgtaaattacgcctgtttcgattaaacggtcaacttcttgtgtcgttaaaccggttaaaaggtttttgttttcatctaatacgccactaatattagtcagcagaattaatttttctgcgcctaatgcttctgcgaccttcccagccaccaagtcagcattaatattgtaagtattacctttttcatcaacacctaatggagcaataacaggaataaagtcgctttgagtaaacatctctaatacgtcagttttaaccccagtcacctcaccaaccatacctaaatcgatatgtttgatagaaccgtcctcttcttgtttttccattaataatttacgggcacgtaataagttaccatcttgaccagtcaagccaattgcacggccgccgtgtttattaatcaaattaacaatagatttatttacgctaccgcctaggaccatttcaaccacttccatcgtagcttcatcggtcacacgcataccatcaatacggtcagactcacgtcctaattgctttaagaaagagtcaacttgtgggccaccgccatgcacaacgatcgggtttaaacccacagttttaagtaaaacgatatcgcgggcaaatgaactctccaattcaggatcagtcatcgcattaccaccgtatttcaccaccagcgtcttaccagaaaaacgttgaatatatggcaaagcttcaatcaagatttttgctttgtcgacgccgagatgctgatcttgtggcattgcgcctctccttattaggcctcagaaagttcttgtgcaatttgcggataacgctcttgcaacatatcaataaatttttgctggatttcctttaaacgtaaaggattatcagcgtcaaatcttacggtaaaatactcacctgtatttgatgctcgaataatgccaaaaccatcatcaaaatcaagacgtacgccatcaattttactaattcgagcacccaaacgatggcttaaaatttcaatatcttgtagtacatgtttagggtcggactgatgggtgccaatataagtatcttcggtacagcatctttcaggataattagaaaataaatcagaaattgttgccgcactcgactcggtgaaatattccattacacgtaatgcagcgtacaaaccatcatcatacccaaaaccacgcccatcattaaatacataatgacccgcgtattcgcccccaaaaatagcgttaccatttgattgggataaatacgcgcgcaggaagctacttcccgtgcgaatcattttgggtttaccaccaagtcgctctacggttctttgaaccatgagcgagcatttcacatcaaatacaatttctttgtctggttgctgctccagacacatttgtgcaaatagtgacaataaacggtcagcagtaagtatattggctttttcatcaagcaatacgacacggtcgccatcaccatcaagggcaataccaatatctgccccctgttcaataatcgttttacgtagttcttttaaatgcgcagcatgtgaagggtctggtgcatgatcagggaactcaccatttggagtcgtacgtaaagcaatgacttcacaacccattttttcaagtacgagttttgagcaatgccctgccgatccatgtaggccatctaatacaacttttaaagggcgcttgagttgaatatcgttaaagattgcttgttggtattttttacaaaattctgaattaaattgaggagttgataattctaataatgaaattgtatgagtaggtacataagtttgcgcaaattcacctacttgctggatcatttcaggagatggaggttcacctcttaaaatccatttaataccattatctgatttagggttatggctagctgttaccattatgccattaccaccaaactcccgtgcaatgtagtacatcatcggggttgagcaacaaccaatatttgtaacatttaaaccctgctctactaatatctcttcgattaaatgcgcataagccggactcgttaggcgcgcatcataaccaataatcagttgagtttgttctgcttgtttatattgttgtgccaatccataggcaattgaacggacgacgtccgtagttaaataagaaagtttgcctctaatatcgtaagcacggaaaatattttttggaaatgagtgtcttacattcatagcgtatcttctatttaaagatcaatttgatctatcgcaaaaacatagagtattcaaaatctgaaaaatgggtatttgctaaaaaaagttaaaagaatatgagtaaagcgttttgtaatataattcattgtaacattcaaggtgtaaaaagaaacacttgtaaaacaagcgtttcttttcattattttttataaattaattattgtttaccagtgtgaccaaagccgcctgcgccacgtaaagtttcttcaaattcctctacttgctcaaattcagcctgaactactggaactaaaacatactgtgctaaacgctcacctggttctaaacggaatgtggtttgaccacggttccacactgaaaccatcaactcaccttgataatccgaatcaatcaaaccaactaagttgccaagcacgataccgtgtttatggcctaaacctgaacgcggtagaattaaaccagcaaaattcacatcatgaatataaattgccatacctgttttaaccaaaacagtttggcctggttcaatctcaattgcttcatctaaacaggcacgtaaatctaaacctgctgaccctgctgttgcatatgaaggtaaaggccactctttacctaaacgcggatcgagcaatttaacttgaactttcatgggatttcctaaaaattaaaaaaattaacgctttaataaagcttttaaatttgccaaatattgttgagcctgttctttaggatcaacatttgctgcaattttctttttacgccctaaccattcgagctcatcttgcggaagctcatcgaggaaacggcttggggtcatctgtttcatttgaccaccatttttacgctgctctgccaaagtcaaagttaagccttgacgtgcacgggtaattcccacgtacataagacggcgttcttcttcaatagtttcagcagcaattgagttcttatgcggcaacagctcttcttcaagacccataatatagacatatgggaattccaaacctttagcggcatgtagagtaagtaagttcactttatcagtgtcttcttcctcttgctgttgctctaacatatcaagcaagactagttttcgaatcacactttcaatgttcttttcatcaacatcttcagcacgattaattaagttttgaatactgctaaacaagttctcgatattatcgagcttacttttctcttgagcaggcgttgcggattgctcacgaatatagtcgatataacccgcttcattcatcatttgacgaactttaggcacaggctcatcatcttccaacaactcacgtgtaaacgtcgagataaagtcagcaaactcatgcaattgagtttctgcctttttaggaagtaccatacttaagcgctggtcagaagaagcaccaagtaaagacaaattattttcttgtgcaaataggcctaacttctcaagagtaactgggccaatcgcacgtttaggcgtattaataatacgtaagaaagcactgtcatcttctgggttaataataagacgtaaataactcattacatctttaatttctgcacgagcgaagaacgatgtaccgccagagagtttgtacggaatctgcatttggcgaagttgtgtttccaatacacgcgcctggaagttaccacggtacaatacagcgtaatctttccagttcttaccattcataagtttgtgagtcagtaagtctttgactacacgttctgcttcatcatcatcattacgacaggtaataattctgatgacctcaccatgccctttatcactccacaattttttatcaaaaatatgcgggttattttgaattacacagttcgcagctttcaaaatacggctggtcgagcggtaattttgctcaagtttaataatatgtagatttgggaaatcctgtttaagcaaagccatgttttcaggtttagccccacgccatgcataaatcgactggtcatcatcacctacggcagtaaactgccccattacgccaactagtagtttcaccaaaatatattgcgcggtgttggtatcttgatactcatccactagcaagtaacgaacacggttttgccatttgtcacgtacttctgcattttcttgcaataagcgggtaggcataacaatgaggtcatcaaagtcaactgcattgtaagcacgtaaattacgttcataaagttgataaagatgggcaaactggacatcttcaggagtttcacacgtcgaatgtgcttgttcaggcaaaatcagatcgtttttccaatctgaaattttcttcattgccttggcaattagttctttactctctgcacccgataaattatcgcgatgcatcaaatccatcaaaatacgtttacagtcatctgcatccaaaatcgaaaaattagcttttaaaggtaaatttttaagttctaaacgtaaaagatttaaaccaaaagtatggaaggtcgaaacggacaaaccttttgcttcttcacgtgataaaagcttagtgacacgctctttcatttcacgtgcagctttattggtaaaggtcatcgctgtaatacgatgcgcaggaatacggcaatgttgcaccaaataagcaattttacgcgtaattaccgatgttttacctgaaccagcgccagcaagcaccaataaagggccttgagtatatttcatggcttcttcttgcttgttgttcagttgactggcagatgacatcgtgtattacctcttaatttttcgagcatgattatagtcatctcttttttagaatcccaatagtaaatctacggatatgtataaatgatgtctaataatgcaatttatgcgccgcagaatgtcgtgattattttttatacttcacccataaaaaaaccacccgaaggtggtttttgaaacaataaactagatcttattgtttagcgtaaatgctgatttctacacggcggttttgttcacgaccagaagcagttgagttgtctgcgattgggttagaagaaccataaccttgtgcatcgatacggctagatggaacacctttaccagctaaatagtttttaactgattgagcacgcgcttgagataatgggatgttaatagagtcattaccagtgttatctgtataaccagtaactaaaatcgcgctcttgttatcttcagccaatgtttgagctactttgtccaaagttgcatagaagtttggcttgatgtttgatttgttagtatcaaaagtaatgctaccaggcatgatcaattgaacagaaccatctgggttacggcctacttctacaccagtaccagccatttgttcgcgtaattttttctctttttggtcaagatataaaccgccagctgcaccaagaactgcaccaattgccgcagcacggttgttttgacggctagagtttgcatttgatttagaaataccgtagccagctgctgcgccgatcaaagtacctaatgcggctttatcgtattcaacgccaccaaggttattacctgttgtttgacaaccagaaagtactactgctgcccctaccactgttgaaataactaatgcacgcattgcatgcctcctcactttgagtgttttgttgttgaatgaataatgaaacaaaaaggaagtataaaacattgatattttgttaataataaacagtttagttatttttttgtaatattttgatgcactttaaggtgtgcactcatcacaatttcttcattgttgtctaagataccgttgtatttcatttcacgatagttatagttgaacaactttctatggattttggatattcggggccatttatatgtcaactgcacccaataagcaatctgcgctaaaaaaaattacacgtggactcactgtaggtacagtcatcacaggtagcactttttttcatggaccacctgtcttagctttaggtttaacaaagctatttaaaaagtcttcaaaaattgatgaaaccaatattcaaattactaatagctggcttggtgttaataattggctgattgatcatgttttacctaatttaaaatgggacattagcattgacgaagaccttgatctgaatatgcaaggccgttatttaatgacttgtaaccatcaaagttgggttgataccacagtaaaccaatatttcgggttaacccgtatgccgcttacccgcttttttaccaagtgggaactcatctttattcctttcgtgggtcaagcttttaaaatcttaggcttcccaatgatgaagcgtcatacaaaagagcaaatcgcgaaaaaccctgaactcaaagaccgcgatatgatggaagcacgtaaagcgtgtgaacagctcttaagtcaaccttttacattattaaattatttggaagggactcgttttactcaggaaaaacacgataaacaaaaatcaccatataaacatttattaaaacctaaagcaggtggtttagctctggcgttaaatattttgggcgacaaaattgatgctttagttgatatgaccattgtctaccctgatggcgtaccaggttatggcgatttctggctaggtgacgtttcaaaaattgcggtcaatcttcgtaaaattgaaataccagactgggttctcgggggcaattatgaagatgacccagtttaccgtgaacgttttcaacaatgggtacatgaactctggactgaaaaagatcagctcatcgagaaaatgaaagctcaatacgcgactacgaatctttaaaaaagaatccacttttatgcaaaacagttccggaaagcaaacgaaatatcaccgtgtagattcaagcagcctttcatttaagctgtttttggtctacgacatctttatggtgtttattatcattttcaatctgttctgtcttgcagccaacttctttttaatgagcagtattggggcatggttctttgaacatatccatttgccccaagtattgtctttctaccgtacccatttacacccatgggttattacctctgaagcctggtttattggttttctaattattgaactactggtccgttggggaattgctatcgtttataaacatcataagcgttggttcttcttccctttcattcactggtatgaaattttagctattattcctcagctacgttttctacgtttattccgtgccgggattattgcataccgtttacacgaacttggttatccggttattcctgaaagctggagaaagacaggtctcttttattaccgtgtggttatggaagagttgtcggatcgcgtagtgattaccgtaattgacggtattcgatatgagcttgaaacgagttctagccataaacaaattattcatgatttggttaatcatcatcgtgaacaatttaccgtaaccctaactgccctattacaagaatctttagcaactgctttaaaagaacaaaagcctgcaatcacccgagctgtcggacaaattgtagatcaagcaatacaagatacgcctgaattaacacaattattaaggcttattccacttgtagggggacgtattgagcaacaaattcaaagtattggtcaacgtcttggtgaaaatatcagtgctggtttaatagaaccgttaattgaaggttcagccgcacaccctaattcaacttatcaattaatttctcaaaaaattagccatataaatattgataaccatgaacttgagcagctggttgagtctgtcgtttttgaaacgctagaagctgtccgtaaacaagttaaagttaaacagtggcaacaaacactcgcggagtatgatcgaatcaaagaataagcatttatttatttttttataaatcacgctagagaattggtacgatttgttctagcatttgctctatttacaataaacttaacgatattacagctcgttttaacgccttgaaggaagacttatggctgatatccggattaccggcagaatggttaactttagcaggataaccttcgatacgaatgatcatgatgtgatccgccagcaattatcaaatatattaaatgaaggttcctatcagggaactgtcgttattatagatagtactgttgaacaagagcttattgctttaattcagctgttagtcagcatgggcttacagcctatggctgtcattgacggtattttaggcgacgaagcacgcgccattcagttccctgtattaccggcagatcaaccattacaacgtattaaaccaactgcagagcaagttgcaattgtagagaagcctagctctgcacaagcttcagtagaaacaaaaaaaccactaaataataatgcagttgcccatattacctcttatcatgatgaaattttgcgtacaggccaatctcttgtacaagaccaaggcgatattattttaaaagctggcatgaatagtggttccgaagtgattgcttcaggaaatatacatatttatggcacggttcgtggtagagtcattgctggtgcgggtgggcacgctgctgcacgcattttttgccaatctttagaggctgaactcgtttccattgccggaacatattgtgtcgcagatgatatccctaaacatgtggtaaaaaagccagtacatatttatttaaatgaaaagcaagagcttgaatttgaagctctagaactttagtttattaagcaaatcaccaaaaaacagcccttttaagggtgtatgtatgaccataataggagtggattcggtggccaaaattgttgtcgtaacatcaggcaaaggtggtgtaggtaaaactacaacgagtgcatcttttgcaacaggtttagcccttcgtggtcataaaactgttgtgattgactttgatgtaggcttacgtaaccttgatttaattatgggttgtgagcgtcgtgttgtttatgatttcgtcaatgtaattaataatgaagcacgtctgcaacaagcccttattcgcgataaagatatcgaaaacctttacattttgccggcttcccaaacccgtgataaagatgctttgagcgacgaaggtgttgctcgtgtaattgatgagctttctcaagaatttgattacattatttgtgactcacctgcggggatcgagcgtggtgcaattttagcaatgtaccatgcagatgaagcaatcattgtgacgaaccctgaaatttcttcagtacgtgactctgaccgcatcatcggaatgttagatagcaaaactaaaaaagttgaacacaacgaaggacgtatacgtaaacatttatgtattacacgttttaaccctgaacgtgctgaccgtcaggaaatgctgacgattgatgatatttctaaagatattttacgcgtaccgacattaggtgttattcctgaatgtccaagtgtattacaagcatcaaacgaaggtaagccagttattctgtattcagaaactaaagctggacaagcgtatgatgacttggttgctcgctttcttggcgaagaccgcccttatcgacacatcacagctcaacctaaaggctggttagcacgactatttggagcgtagatatggcaggattctggagtaaattatttagcagtgaagaaaaaccatcaagtgctcaaactgccaaagatcgtttaaaagtcattgttgcatcagaacaaggtttaggccgtcgtttaagccaagacaagattgaccaaatgaagaaagaaatcatgcaggtggtcagtcgttatgttagcggtgtaggcgaacagcatatccaaatgcaagttcgttctgaggcgaacatcgaaatgttagaaatgaatatcaatttacctgaagaacgataattctatttctgactattcaataaaacagaatcaaggcaaaataacgcaagttattttgccttttttaaaatgaggagattgtcatggcattatcacagccagcaactttcaatgaagaatggtccgatgagcgtgtttttgcctacctcaaccaacttcctccaaatggtgtgaacgcagacttccatgtgctctaccatgctttcaaacatatgcgtccaaatgactatgaacgtcttttaactaaatttgttgcagatggacgagatattaatgcgactaatccggaaggcgaacgcatccatgacgtgattgctaaattcccacgtcaatcagcgccgtttttagaagttttagcaaagtttgcttaagctttttttatttgaataagactgcataatctatcttagtaaaatttagtagatagattatgtggttcattcaaatatctaaattatttacttttataaaaaataatcttaaagtcatcagcactatttcattccaaatataaattcatgaatccagaacctactaatttaaatcaaacacaatccatccaatcaaatcaaatcaaatcaaatcaaatcaaatcaaatcaaatcaaatcaaatcaaatcaaatcaaatcaaatcaaatcaaatcaaatcaaatcaaatcaaatcaaatcaaatcaaatcaaatcaaatcaaatcaaatcaaatcaaatcatatagaaaatttaaaagttattagtgtcaataagtttatctttctatccttaatttcctttggcttatacccaatttggtggatgtttaaagcatggcgattttttctaatcaaagataagttaaatattatgcccgctgctcgtgcaattttttctatattctttttatattcactatttaatcggataaaaacttatgcaaaagaacaagggtatattaatgatttctcttcaggttggatgtatttaggatatctcattacatctttactggttcgcctacctgatccttactggcttatctctctctgcagcattatatttttaataccagcctttaaagcgttgaattatgcacaaaaacaaatagaaacaacaattaagcaagaaaaattcaatacacctcaaatcattttaattattataggttctatcatgtggctgctgattcttttcagttttgttatattattcctatataagtgatctaaaagttagtaattaaaaaagcctcataaagaggcttttttattatctggatttatcggtttccaatcaggaaaataccgaaaacggtaaaaataccacctgaaataccatcaatccattttgaaaaattacggtaagcggctctaaaactcggtaatgaaaaaataaaagtcacaaagcagaaccataaaattgtttcaaccgacacaataataaaaagcagccaatgaacttgatcaagctgagggtttgctaaaaataaagagaatacactaccaaaatagatcacagctttagggttcgataaattggtgagtaatcccttcataaaaaataaatacggcgctttcggtaattcaacagttgtcacctcttcctgctgattttttgaaaatgccgaacgtaacatttggtatcctaaccagcataggtataaaccgcctgcaataagtaaaccttgctttaaccaagccattttctcaaaaataatatttaagcccatcaatgctaaagaagcccaaaacataacacccgctgttattcctgcaacaaccagcattgcttctttacgagatcggctcactgcggtctgtgataccagaaaaaaatcaggccctggagtaataagcgcacaaaaatgaataaaagctaacgtaattaacgcgactaacatgttgtcctcctgatttgtttcattgttatttattgagaagcacacattagcattttttactatttgataaaatctcaaactacccgtagtaattattatttttaaccataaaaaaagcctccgaagaggcttaattttaactatagatattaaactaaaatatcgcgcttaccgttggcccccatagcactcacaataccattctcttccatttgatcaatgatacgagcggcacggttataaccaaggctaaacttacgctgtaatgaagatgtagaagcttttcgagtttctaaaacaaacgatacacattgatcataaagtgcatcacggtctgaaccaccatcaccttcttcaaagccacgcgaagcaggctcctcatcaaatggagttaagatctcatctacgtagtctggttcgccacgttcacgccatgcatcacaaatacggttaacttcatcatcactaataaatgcaccatgcacacgttctggctcaattttacctggccctaagaacagcatatcaccatggcctaacaagtcttctgcaccacctgcatccaaaatagtacgtgagtcaattttactgtttacacgtaaagctacacgcgttggaatattggctttaataagacccgtaatgacatctaccgatggacgttgagttgcaagcaataagtgaataccagcagcacgagatttttgcgccaaacgtgtaatcatttcttctgctttcttaccaacttgcatgatcatatcagcgaactcatctgccacaatcacaattgatggtaatggcgttaaacgaggtgcacgctcttgtgtcgctgaatcacttggtttccatgttggatcaatcaagtcttctccatttgcaagcgcttcttcaacttttcggttgtagtcacttaacttacgaattttaaggaacgacataagcttataacggcgttccatttcatttacacaccagtttaatgcactcactgcatctttcatgtcagtgactacaggcgttaataaatgcggaatatcgttgtagtttgcaagttctagctgtttcgggtcaattaaaatcagacgcaattggtcaggggtatatttaagtaacatcgataaaatcatcgagttaacggcaacagatttaccagaacctgtagtacccgcaaccaacatatgcggtgcttttgccaagtctgttagaaccggattacctgaaatatctttacccattgccatactaatgagagcacttgggtcacgatatgcgggtgtttccaatagttcaatcaaacgtaccatttcacgagcactatttggaacttcaataccaatatatggtttacccggaataacctctaccacacgtacagaagccatagacattgaacgtgccaagtcacgggaaatattagtcactttagatgctttcacacccggtgctaaatctaattcaaaacgtgtaaccactggacccggctgagcttcaaccacctgagccttcacgttaaactcttgtaacttgatctcaagcaattcagataaacgggaaagctgttcctcggtaaagttaactttcttatttgggtcaaccttatcaagcaattcaaagcccggtaatgttggtaaatctaaacgttttttggccacttgcatggcacgagacattggtcgacctgatgcatctgttagaggcgcatcaaaatcaaactcatcctcaaggtcatcctgaggctttccagcagtttcctgccaagcttcaataaattcttcttttgacagcttctctgcaccaatcgtagtttgaataggcgcttttacaaaagccgaagattgcgcatagctacttgccttgatcggttgagttgctggcgggatatcctcatcaatcaataggtcatcaaaatcatcaaagacttcttcattcgataaatttttaggtgactgatttaaattcgttacaggtacagatgattcaactaatgtttgagaagcttgcggtgtaacttctggttcaacatgatgatcttgaacaaatggcgtatgcacgtcagttgccgttttactatttggaactgcagcaagtagttcatcaaaaatctcatcatcattccaatctaaaccttgatgagtatccgatggttgattttgtttagcctgataaactgtttgctgaaattgctcatgagtcgaaggctgttcacttgaatcatcagcagctcttaacagcgcatcaatttcttttttatggcttacatcatcacgctgtaacgcacgccaaacctcccccgtagccactaaacgctcactgtcttttttaagttgttgggcttgctcaagtgtacgctcaaagttttctggctgaggagttggtttttcttcaattgtttcaggttgactttgttctttagctaaaacgtcggcaaataaacgctctgctatttcatcatgtcgtgtagagctcgctttgctttgagctttttctggttgggcatttagctctacttcatccgtaacttcttctgctttaggcatctctgcaacttttaccgttgctgctttattcgcaggctgtgtggttaagtcataagcagattcgttaggagatacatttttatagaataaatcttgtaaataaccaggcattgctttgagcgtaacccatgttttgctccactgcaccccaaatgccaaagtgaacaataccactccgaaaacaagtagaaataatgtcgcaccataaattgttaacagttgagataagctttgccccaactcataaccaataatcccacctgcggcattatctaaagtatctgcaggtacattccagtgaaggtaaagcaaactcgaaacaacaagaattaagaagaactgcgcagcataacggaatgggcggtttagaaaactatgtggccaccagacttgaatcgcttcaacaaataggaagattggaataagtaaacttgcccaacctaaaaagccaaacagcaaatctgcaatccatgcaccggcaataccacttgcattggatacttgctgagtatcacttgaaatatgcatccagcccggatcaaatggtgtatatgttactgtcgccagaaacatataaatcccaaaagagaccaagaataatgtcatcaataagcgctgtgcataaacacttgacaccgcagtcatatactgtcctgtaacccatttaattattggtttagagatgtgaagacctacatttcagatcttcaacgattgaactttatattatgcacctgttcttacaaaaaaggtgcatgattctttacagttgttgttaacataaggctcttctatattgttatataacttaattcgattgacctgatcaatattatccacattgatttaacgctattggtcggcaatttcacgtataattttcaaaattctcgaaataaataaggataccctcaatgagtgctcgtcattctcggttaattattctcggttctggccctgcgggttatagtgcagctgtttatgcagcacgtgcaaatcttaaaccaacacttattgcaggtttacagcttggcggccaacttacaacaacaaccgaagttgacaactggccgggcgatcctgaaggtttgactggtcctgtcctaatggaccgtatgcaagcacatgctgaacgctttggtaccgaacttgtctatgatcatattaatgaagtggacttaaatgtacgtccttttgttcttaaaggtgatatggatgagtacacttgtgatgctttaattattgcaactggtgcgacagctcaatatcttggcttagagtctgaacaaaaatttatgggtcaaggcgtgagcgcatgtgcaacatgtgatggcttcttctacaagaaccaaaatgtgatggttgttggtggtggtaatactgctgttgaagaagcactttatttatcaaatattgctgaacatgtgacacttgtacaccgccgcgattctttacgctctgagaagattttacaagatcacttatttgctaaagaaaaagaaggcaaaatcagtatcgtttggaaccatgaggttgaagaagttcttggtgacaatactggcgtaacaggtgttcgcttaaaatctacgaaagatgacagcaaacaagaagtacaagttcaaggcttattcattgcaattggccataaaccaaatacctctatgtttgaaggtcagctaaacttacgtgatggctatatccaagtacaaagtggtacttcaggtaacgcaacagcgacttctgtagcaggcgtttttgctgctggtgatgttgctgatagtatctatcgtcaagcgattacttcggcgggttcaggctgtatggctgcactagatgccgaaaaatatctagataacctttaagtttagatatttcaaacagccgttttataacggctgtttttttggaatttataataattactggctgccctgtattaatttttatagcatagccctaaagcacatattattttggttttatgaaaacactgcctctatctcaatatattttcccagatccggaggaatcagatccagatggtcatggcttaatttgtataggcgctgacctctccccttccacactctatgaagcgtatacacatgggcttttcccatggtttaatgaagatgaacccatttgttggtggagccctgaaccacgctgtatcatttatcctcaaaactataaaccgagtaaatcgcttattcggaacatgaaaaaatatgattacaccattacggtaaatcgtgcttttgagcaagtcattcgctcatgttcactacctcgaagctatgctaatgaaacatggattagtgaagatattattgaaggctattgtggaatgtttgatgccggttatggctatagcgtagaagtctggcaagaagagcagctggtaggtggtttatatggggtaacgatcggtaaaggttgttttggcgagtctatgtttagtacccaaaccgatgtttctaaaatggctttttatacgttaatgttaattggtcaagaaaatcagcttccttgggttgactgtcaacttgtcaatagtcacttaattagtcttggggcttgtacactttctcggcaagaatatcttaaatcgttacaagatgtaattattcacccctctatcaattggaaaaagtatcaagaacgtgtattttcaagtaaaacaatagcattaaatgcaaaattaatggaatgataacaggagggaccaatcatgaaatcatatcacccgaagtcccttttaaatgatctgcaatattatattactccacctcatgattgcagctatttagaaaataaatcagcacgcatggtctttttagacccgattcatcggattgatgtggtgacgctttctgaattatcgcgattaggttttcgtcgtagtggcgactttgtataccgtcctgaatgtcatttatgcaggcagtgtttatcttgtcgtgtacctgttgccgatttccaaatgaacagcatgcaaaaaaaagcatggaagcgaaatcaagatctcaccatgactgttctaccaacacggcaagcctcacaaattcattatgatctatatgaacgttacattaacgagcgccatgccgatggtgatatgtttccgccaagtttagatcagtttgaaaaattcttggtccatagctgtacagatagtttcttcttagaactatggaaagacaatcgtcttattagcgtttcgacttgtgatttaatggatgatgggttatctgccgtctatacgttctttgacccagatgaacaccgtagatctttaggcgtttattcaattctgaatcaaatcgaatatgtaaaaacactcggtttagaatatgtctacttaggctattgggttccccactcagctaaaatgaactataaatctcaatatacgccgctagaacttttactagatgggcaatggcgccgcttaaatagatcattatcaccagaagagatcaatcagttaggcaattccctcatgaccacattaccttctgaatggaataatttaattattaaataatctgcttctgtcttgttgttcaaacagcaacaagacaggcattcttagaataaagaagcaaaatcatcagtacagctttttaccataataacggcattttcacgcccaccctcttgggttggataatagttacgacgcacatcaatttggtgaaaccctgttttttcgtataaaccaatagcagctttattactttcacgtacctctagaaaaatttgtacggggtgattttctaaacgctcaatcgacgcatctaacaactgatatcctaatcctttaccttgcatttgaggatcaattgccatgagcagtaaattcgcttcatctaatacaggttgtaaaatacaaaaaccaaccaccttattatttaattctattaccgtacattggtaagaatttaaagattctacaaattgctgcctagaccatgggtgtgtttgaacaagcttctcaatttgagcaacactatcaatatctgaggcttgcatagtacgaatcatgagtttcaacacatttttagatttcaaagtaaacgtattatagaaacttaaatagaaaaaacgagtaaaaaaaagagcaattaaattgctcttttccagtcagtttttttaaagacctaatttttcacgccaagtggccaataaagctgtcgtatccgaatcatttggatggaattttggtcttaagaaatctaataattctggaatttgacgagtcataaaacctttacggccatacatgaacttaagcatgtatttggtatctttccatgttaatttatcatcagtcttaagtaacttagcagtaaaataagactgagtagcaaaaattaaggccattgcaatgattaaagcagttgaacgcataaaataagcttttggcccctgcccatacatattggtatagacatcaaacgctacagctttgtgttcattttcttctaccgcatgccacatccataagtgatacatagtgtcatcttggaacatggcttgaatttcagggttttgtaaaagctcagccgcaatagttgaggtaaaatgttctaacgcacaggtacctgttaaatcaatcatttcttttgtataaccaaaaggtttcattagcttggttacaaccgcagtacctactttaataactttacctgtttgtttttccattttacgaacatcatatccatacgcctgcgcagaagcattaaatgcaagatgctctttagaatgcatagcttcttggccaataaaagcacttatttctttttgaagtgctggatcagccagtttaggatcatttcgcacagcacgagtactgtttacaaagaactgctctccttccggaaaaagagctgataatgctgtcataaaatgagttaatcctgcatcgtaatttgcccaatagcgtggaacttgagcaaactcaaagtccatacgacgcacagggaaacttgctccggcacgattagaaatatttactttagcattcatgtcagactcctttaagcgaatcgaaaattcacttatatccttatttattttcttaatatttataataatacgcctttaaaggcgctatttaagtgcagatgaggccagcaaattatcagatgaggtcatcaatagcctcatactagggcaaaattaacaagtatcttttaaaagtggatcataatttatagacaataaaaaaggactgctaacagcccttttcacttactttcagcttacagtccaagtttagatttccaagtttttaacaaactaaccgtatctaaatcattcgggtggaaacctggtttaaaataagccaacatctctttagccatacccgtaataatgcctttcgacgggctataaccatatttataaatcacaaacaactcatctaagtttaatttatggtcttgctttaaaagacgaaccacaaacgaagattgaattgcgaaaataagagccattgcaaaaacaagtgaacttgtgcgtaaagcataagcttttacacctttaccaaagacaccttcatacacatcaaatgcaactgctttatgttcattttcttctattgcgtgccaataccacatggttgacatcgttttatctgtcatcaactcttgaatataggtattaactaaaagctgagatgcaatggttgcagtaaaatgttcaagggctgtagtagcagttaggtccaccatttcttgcgtcataccaaatggttttacgagctttgcaaaagttttacgggcagtttgaatagccgtatcggtgaacttttctaaagtttcaacatcatgaccaaatttttgggcagaagcattaaagtttacatgctcttgagtatgcatcgcctcttgaccaatgaaagcactgatttctttttgtagctcttcattgtctttaattgctgggtgataacgcacagcacgcacactatcaataaagaacttttcaccagctggaaatagcgctgataacgctgtcataaaatgtgtaagtccagcggaaccattcatccagtattctggcacatcattaaaatcaaagttcatacgacgtacaggaaagcttgcccctgcacgatttgtgatattcactttagcattcatattgaaagctccttaccagtaacctaagttacttaaactttattgttcgttttcttgattcttatcatacaaacttaataaaaaggcttaagtgcaaatagggacattgaagtatcagttaaggccagctttcaactgaattgtctaacaattcgatataaaaaaagcgccccaaaaggagcgcttttttcactgaaaagtgattatgcagttactttagcaacaacaccagcacctacagtacgaccaccctcacggatcgcaaaacgtagacctgggtccattgcgattgggtggattaattctactgacatttcaacgttgtcacctggcattaccatttcaacgccttctttcaactggatcgcaccagttacgtcagttgtacggaagtagaactgtggacggtaaccatttaagaatggagtgtgacgaccaccttcttctttagaaagtacgtatacttctgcgtcgaatttagtgtgcggcttgattgtacctggtttagcaagtacttgaccacgttgtacttcttcacgcttagtaccacgaagtaagataccacagttctcacctgcacggccttcgtcaagaagtttacggaacatttctacgccagttacagttgttttaactgtatctttaataccaacgatctctacttcttcaccaactttgatgataccagcttcaacacggcctgttactactgtaccacgaccagaaattgagaatacgtcttcgattggcatcaagaatgctttgtcgattgcacgctctggctctgggatgtaagagtcaagtgctgctacaagagcaagaactgattcttcaccgtaaggaccagcttcaccgttaagcgctgcaagagctgaaccacggattactggagtgtcatcacctgggaagtcataagtagaaagaagttcacgtacttccatttctactaattcaagtaattcttcgtcatccacaaggtcgcatttgtttaagaatacgatgatgtaaggtacacctacctgacgagaaagaaggatgtgctcacgagtttgtggcattggaccgtcagttgcagcacatacaaggatcgcgccgtccatctgagcagcaccagtgatcatgtttttaacgtagtcggcgtggcctgggcagtcaacgtgtgcgtagtgacgagttggagaatcgtattctacgtgtgatgtattaattgtaataccacgtgctttttcttcaggtgctgagtcgatttgtgagtaatctttcgcttcaccgccgtaagtttttgcacaaattgttgcaatcgcagcagttaaagttgttttaccatggtcaacgtgaccgattgtacccacgtttacgtgtggtttattacgttcaaacttggctttagccatgatgatcttcctttattaactactcatggagggtcactccatgagcacttggtttttaactaagaattagttagggcttatagtaatcgaaagattactcgtcgtcaccttttttaccgccagcttggaatttagcgatgatgccttcagccacgttacgtggagtttcagcatatttagcaaattccattgagtatgtcgcacgaccttgagacatagaacgcatttgagtcgcgtaaccaaacatctcagcaagtggaacttctgctttaattgcttttgttccaccaggaagatcgtccataccttgaaccataccacgacgacggtttaagtcacccatgatatcgcccatgtagtcttctggagtctcaacttcaactttcatgataggttcaagaagaacaggatctgctttcatgaaaccatcacggaatgcgtaagaaccagccattttgaacgacaattcgtcagagtcgacatcgtggtaagaaccgtcaaaaagaacagctttaacgcctacaactgggtaaccagccaagacaccattcttcatacgttcttgaatacctttgtcaactgcaccgaagaattctttaggtactacaccaccaacaacttcttcagcgaattcgtattctttaccagcagcttcaacgtcaagcggttctaaacgaacatatacgtgaccgaatttacctttaccacctgtttgacgtacgaatttaccttcttgctcaacagttttcttaatcgtttcacgataagcaaccattggtttaccgatattcgcttcaacaccgaattcacgcttcatacggtcaacgatgatgtcaaggtgaagctcacccataccagcaataattgtctgaccagattcttcatcagtgtgaacacggaatgaagggtcttctttagccaaacggcctaaagcgatagacattttttcttggtcagctttagtttttggttcaaccgctaactgaattactggatctgggaattccatacgttcaagtgtaatgatgtttttctcatcacataatgtatcaccagtagtaacgtctttaagacctacacacgctgcgatatcacctgcacggatttcatcaatatcttgacgttcgtttgcgtgcatttgcacgatacgaccgatacgttcacgcttagatttaactgggttataaacagcatcaccttgtttaagaacaccagagtaaacacgtacgaatgttaagttacctacgaatttgtcgttcatgattttgaacgcaagcgcagagaacggagcttcgtcagatgcttcacgagacgctttagtttcgtctttatcgtcaaggataccttcgatcgctttaacttctgtaggtgatggtaagaattcaattacagcgtccaacatacgttgaacacctttgttcttgaatgcagaaccacaaagcattacttggatttcagaagctaatgtacgagcacgtaaacctgcgatgatgtcttctttagaaagatcaccctcttcaaggtatttgtccattaactcttcagaagcttcagcagcagcttcaaccatgtttgtacgccattcttgagcagtatcaactaggtcagctggaatctcgccgtattcaaacttcataccttgagaagcttcatcccagataattgccttcatttcgataaggtcaactacaccagtgaatgtgtcttcagcaccgattggcacaacgattggcacaggattcgcaccaagacgtgttttcatttgttcaacaacacggaagaagtttgcaccagtacggtccatcttgttcacgaatgctaaacgaggcactttatatttgttagcctgacgccatacagtttcagactgaggctgtacaccaccaactgcacagtaaaccatgcaagcaccgtcaagaacacgcatagaacgctcaacttcgattgtgaagtcaacgtgtcccggtgtatcaattacgttgatacggtgttgtgggaattggttacccataccagaccagaaacaagttgttgcagcagaggtaattgtaataccacgctcttgctcttgttccatccagtccattgttgctgcaccgtcgtgtacttcaccaattttgtgagatacacctgtgtagaacaaaatacgttcagttgtagttgttttacctgcgtcgatgtgcgcagagataccgatgttacggtaacgagtaattggggtttggcgagccatgatgtctacattcctaaatgttatctttaaaacagggcgcaccaattaaattgatgcgcacgaatactcaagcggggcaacttaaatacccgcaaagcccccactttggtagagagcaatgttgaatctagctactgtatgcatgagtattctcctgattagggactgttttatccgcttagaaacggtagtgagagaaggctttgttagcttctgccatacggtgcacgtcttcacgttttttgatcgcagcacctttgccttcagctgcatcaagcaactcgccagcaagacgtaaagccatagttttttcagaacgcttagcagcagcatctactaaccaacgcattgctaaggcagtacgacgggatgggcgtacttccataggtacttgataagtagcaccaccaacacggcgtgcttttacttcgaccataggacgaactttttcaagagtagtctcgaaaaattcaactgggtctactttgtttttttcttgaacgcgttctaaagcaccgtaaacgatactttcagcaatagattttttaccatcttgcattacgtggttcatgaatttagcgattgtttggctgctaaatttaggatctggaaggatctcacgagcagcgactacgcgacgtcttggcattttaatacacctaataatatgacacttcaggatgatccagcagtttgtacaagtgtcatgtacacgacgctggccttactatacgtcgcttgaattacaaatctatgaagaattcaaacaagcgaaacgctaaagggcttttggactagtttcccagaattacttcttaggacgtttagcaccgtatttagaacgtgattggttacgatctttaacaccagcacagtctaaagaaccacgaacggtatggtaacgtacacccggtaagtctttaacacgaccaccacggataagaacaacactgtgctcttgtaagttatggccttcaccaccgatgtagctagatacttcaaaacctgaagttaagcgaacacggcaaaccttacgcatagctgagttaggttttttaggtgtagttgtataaacacgtgtacaaacaccacgacgttgtggacaagccttcaacgcaggaactttggatttttcaaccaaagtcgtacgacccttacggatcaactgattcgttgttgccatatggcaattctcccgttattaaaaaaccttaaaaagaaaacacctctttttaagggcacataattgtaagccaagatgcaaaaatggtcaacatggcagcagttgccaaatgttgaccatatcaatgattgacaggattatttacaaatttaaataggggtgaaatttagttttcaaaccctacctttgtaattgtattgttaagagtacttttgcccctctataacgtcatcattttcttcactttcaggctctaatgctggcttttgttcactatgttcatgttcaactacatgtttctctgcaagatgctcaattccttggtgaacattttcttgaactttttcttcgcttttttcagaagtatttgatttgaccacaacagatacttttgaaattacatcatgattttcaattttatgatgctgcgtagcatggacactaccattttcacccacatttaaaagacgtggactcgctttttgaattagagttaccgccgcatagtacgcctgtaatggtgataaatgctcatttggatgttcatttaaataatgtcttgctgcaccgaaaatagcttgtgccttatggcctacatcttcttgtaacttccaactataaacagcactaagcactgcaccagctactggagtaaacttgcctaccacagcaagttgcggaactttatttaaccagttccatttaaactcaccattttcatcaactaaccagctttttaaggtttcaatatcatttgaagagccaagtacttgctggaactgttgaatatcttgagtctccaacatatttcgtaaggctttaagtgccaagagtaaagtctgcttttccgcaattaagctgatatcaacttctttaaaaataaattcaactacgtcttggtcagttgcttcggttaaatcaaagccgtgtgatctacctgtttggtaaattgttctcaaaactaggactaatgaaactggaatatctacggctgctccaaccattccagatacgcccgtaattgcaccttgaatactggcaatcaatttattttgttcaataagtgcctgacttaaacgttgggagcgtgaggtatcttttgtaagctcaaataagtctttagcccccgcttcttctaaaattttttcagttaacgtacttttcgaactaaagtcattcaaccaatcaaataaatagcttgatattttttcattccagtcaggtgaaataaatgtagcgataccattgacctttctaaaatggcgtccaaatacctgacgagtaactttaggtaaatgttcacgtaacatttgttgtgggctttcatactgctccacttcaaacggacttttatttctggcactaccttctactgttttgccatttgaaagtggctcaaccaatttacttacctcaccaatttgactttgctgcaagatgtttaaaccagtagaactgagctttttagccactccgaagacctgagaaaacaaattgtcagattgattattattaaattttgtcatccagtacctcgattttttaatttatctaattagagataaatactaggtggaatgtggatttatctcaacttgaatgtgtgtattttagttaaccctaaatgcaacatactgtgtatttggttattttttttaaatgcaaaattgacataaagatttgccataagaaataaaaaacctttctgctatcatggtagcaacgaaaacatgggtctactgttcttacagctatattctcctatcatttaatagctgctcatgatcatagactttaaatatcaccataaagggacctgtagatgaaacgtgttgtaatcactggtatgggtattaactcatgtatcggtaactctttagaagaagttactcattcacttaaaaatggaatctccgggacacgttttaacccaacttatgctgaactcaattttaaaagtcatgtcagcgctgcggcagaacaagattttgacaatattgatcgtaaattaaaacggttcatgggcgtatgtgcaatgtacgcttataactctgctgttgcagctgttgaacatgctggcttaaaagcagaagatttagcagataatccacgttatggtattgccggtggttcaggcggtggttcaactgcttctgttgtagaaatgactgaacttttagaaactaaaggtgctcgtaaagttggtcctttctttgttccacgtaacatgacaaatacaatcactgcaaacgtgggtgtagcatttaaacttcaaggtattgctcactcaattgcaagtgcttgtgcaacttctgcagacgcaattggttatgcatataaccttatcgctctaggcaaacaagatcttatgcttgctggtggtggtgaagaagatcactggtctcaaagcctattgtttgatgcaatgggtgctctgtgttctaaatacaacgacacacctgaaacagcgtctcgtccatattctaaagaccgtgacggtttcgttattgctggcggtggcggtttcgttgttcttgaatctcttgaacatgctcaagcacgtggtgcaaatattcttgctgaagttgttgcttatgctgcaaacagtgacggtgctgacatggttgctccaagtggtgaaggtgcaactcgctgtatcttgatggctcttgaagaagcgaaacaacacggcgtagataaaattgactatgtaaatacgcatggtacttctacaccagcaggtgacgtgactgagcttaaagcaatggaacgtgctttcggtgaaggtaaagttccacctcttagttcaactaaatctatgactggtcacagcttaggtgctgctggtgttcatgaagcaatttactctgtattaatgcttcaaaatgactttatcgcgccaaacatcaacgtgactgagcttgatgaaggtactgaaggctttgatattgtgcttgaaaaacgtgatacaaaattgaatactgtaatgagtaacagttttggctttggcggtgttaacgcttgcctaattttcaagaagtgggatgcataatcccgcgtaggattatcgatggatgcaccttctgatgcctttttgtgggtaaaagcattacatattattgctgtggtttgttggttcgctgctttgttctacttaccacgtctttatgtttaccatgcaatgagtgatgatgctaccagccatcagcgctttgaagtgatggaacgtaagttgtatcgaggtattatgtggccatctatgattgccacattaattactgctcactttctcgtagattggggtgatgcaactagacattaccatgaagccacttggttttatctaaaagttggattagtggctttattagtgatctaccatttagtttgtggttactatcgcaaaaagcttattggaaatgctcactacaaatcacataagttctggcgtttcttcaatgaaatgccaaccttaattttatttgctgttgtgattttagttgttgtaaaacctcagttttaactggggttttttattatctaggactctcatctcattctcttatgcattttactggctcaacctattcataatttattattcagagcaaaagacttttataccagtcttaatacattcttataaaaacatctcatcttttttataaattcaatcaacagaaaggataaagcatgaaaagtctggcttttattcatcgtaacgatactcgctttgcggtcggtgatttttatccagttctttctgttttttcctaccatgagttaggcaataccctctcacccttcttactactcgaccatttaggtcccggaaaaattgcaccttctatgaaacgtagaggagttaatgatcatcctcatcgtggatttgaaacggtaacacttgtttatgcaggtgaactggagcataaagattcatctggtggaggtggatttataagtgctggcgatgtgcaatggatgaccgcagcctctggtgtgattcatcgggaattgtttagtgaagagtattctcgatctggtggtccctttgaaatgattcaactttgggtcaatttaccagcagcaaataaaatgaattctccacgctatcaaagtttaaagaaagctgaaataccgatggtgaaactggaaaatgaagctggatttgtacgtattattgcagggcagtttaagcatgttatgggccctgcacttactcacactcctattaccgtattagatgtagagctccaggcaggtcaacaagctgccttccctgctcaatccggtgaaacagctttagtttatttacgttcaggtcgggcacaatttcataaagatgaagacgttttagaggaacaaggcctagcagtcatgtcaaaccaaggagagcatttctctattactgccctgcaaaactgcaaattacttattttgacaggacaacccatcgcagaaccgattaatggtcatggtccatttgtaatgaatacttatgatgagattttacaagcctatgatgatattaaaaatggaagatttgccaagtaaaacagaccagctgccgcatgagaaacaaatgacagttatttgcgtctgtctttcaacatagttgatgtatgttatgctacaaaccaatagatgaacttatttattagcaaaactatgttcactctcaacgcttttaaaattgtcatatatcgacaatttattattttcaccctttttatatttcgtcacttaaaaagctatccaattcgatttcttacacctgaagaaaaagctttagcacaaagggtgtttgggagtttgctagattgtgaacgtcctaaaattattgctactcgttacttaccgtggcaagcgcatggaattttgatggctccaaatgggaatatatatgtcaatctttctgactacagcagtaattacgcgctagagtctaaattcatacaagggatttttattcatgagctagctcatgttatgcaataccaacgaggtattcatgtattactaaaaggtgcgttactgcaatccgcctactatctgagttttaagtattacaacccttataaatatacttaccatcctcagaaagcgtttagttcttacaatattgagcagcaaggagaaattgctagagatatctgttcaggtaaactgccaaatatcatttgtttacctcagcttgatttgtaaccaaataatccagtttgttttcaacgtaacttttttgctaacttaacaacagaaatttgataaacaaaaaacataaaaataaagttgagatctaaatttactaatgtcaaattattgaaaataagtataaaaacttatttcaaatttttgagcgataaggcagtatacaaacaataaaaataatgaagcttgtttctattgtatacagaaaatctcgttatttttacgcagaaaatatgtgattggtatatattattgatcttgacatttttgtttactattttacgtgtttattatcgtgctatacacatcgttgaaaaattatatccataaaaatcaacactatgtgtatttatattcgttatgatctaggattaggtttgaatgaaaagttttaaagttgcccttgctcagttttctccgcatattggcaatattgactcaaacacccaaaagatgattgagcaagcaaatcaggcgaaaaaacaagacgctgacctgattatttttcctgagctttctgtgattggttatccagctgaagacttattgttacgtccaaatttaaataagcggatgcaaaaggcttttgctcaacttagtgaagttaaagatattgtgatggttttcggcttcgtaaaccagacagaagatggccaacgttataattcagctgctgtcatgaaagacggtcaggttttaggtgtcttcaataaacataacttgccaaactatggcgtttttgatgaaaaacgttatttccaaaaaggccatcagcacttggtgtttgagtatttaggccataagtttggtgtactcatttgtgaagatatctggtcaatcaatacagtaaaacaattaagccaattaaatgttgatactgtacttgtgcttaattcatcgccatatgaagtgggtaaaccacagcatcgtaaacagacattaagtgagcttgcaaagcagcttcatttaaatattgtttatgttaaccaagttggtggacaagatgatttaatttttgatggcacaagttttgtcagcaatcaaaatggtgaaattgctttacaagcacctagctttaaagaagatctctatattgctgaatttgaccgcgatacaaaattatataaagttgtcgagtctgctcctgcattagaaacttttgcagagatctatcaaggcctagtcatggcaacacgtgactatgtagaacgctcaggttttcctggagtaattttaggtctttctggcggtattgactctgcccttacgcttgctattgcagttgatgcaatcggtgctgagagagttcaagctgtgatgatgccatatacttacacatctcaaattagtgtagaagatgcagcggaacaagctcgccgtatgggcgtgactttcggtattgccgaaattcattcaatcgtaaatagcttcatgcaaactttgtatccgttctttggtaattcaccagccgatgcgactgaagaaaatttacaagcgcgtgctcgtggcacattacttatgggcttatctaacaagtttggtaatttagtcctttctacaggtaataaatctgaactttcagttggctattgcacactttacggtgacatggtgggtggctttgctgttctcaaagatgtttataaaacaatcgtgtttgaattagcaaaataccgtaatagcttaagtgaaactccggttattcctgagcgtgtaattactcgcccaccttcagcagaactacgtccagatcaaaaagaccaagactctttaccagcgtatgatgtattggatgctatcctttatgcatacattgaggaagatttaggtcaggcagacattattgccaaaggttttgataaagaagttgttgaaaaagtcatccgtttagttgatcgtaatgaatataaacgtcgtcaaggtgcgattggcccgagaattacttctcgtgcatttagtcgcgaacgacgttatccgattgtcaacggttggacagcgaatgactgagcagaaaaactcatcaaaaactacagcacttgctcaagcacttttgcttgagcaggtggaatttttcaaaaaacaattatctatagaaaactcacctatttatttccggcaatttattcagctttttatgcaacatgccgacgaaattaaactttatgaagttgtggatttagaacaattacaagccgttgtgaaacgctatgcttttgaaatgcagcttggtgcaggcttgcttgagtttattggggaaattgcacagcgtatttatttatctgccatgaaatctccagttcagctacaagacttggtatccgatcaccagtttgaaatgtggctttccaagtttttggaaatggagcatattccacattatctcaatcagtttttaagaactagcccatctgtccaacagctttgccaatatattgccacttcaaccttagaacaaaaattacctaaatttctaacggcctctagagtggatgactaccattttgaatggcaacataaactcaaaaaattctcttttttacagcaacaacgtcttgagcataaacttgaaacgtggattgccggctttattcatgaacaactgacagaattaagccttttatcggctgaagatttagaaagcttagtacgtcatatctgggaagatattagacataaaaaaatctatgagtttatgaaacagctcactcctctcgatgttgaggagttctttgttttaatttatgaatactggaaagaattacgacagtcacaatttatgcaaggtcttattttgtatggtgtcgaagttttttatgatttttataaagatcagagtttatttgaagtattaagtgcaattggtttatccgaaactgacttacaaactgaagctttacgtttttatccaaaagttatggatgcctttaatgagcacggtattttggaaccgttacttcaagcgctcttagctcctttttatcaaagctcaaaaacactcgatataattgaaaaacattttagtgagtaaaaaatagataaaaagaaaccacgcaggagcgtggtttttaaaatggtggctatgacgagacttgaacttgtgacccccgcattatgagtgcggtgctctaaccaactgagctacatagccgtaaactgtgtgcgcattatctatagttctgtatagcaggtcaatacttcaaaactctttatgcccaccaaatgaacaaatatgattcagatcaccattatttgttcattttttagcaaattcttactttaagcaattgatcggccacagaaatatattaaagatctaatatcaattttttgccttttgctcttgatacacaaatcatcatgctcttttgtgaagctttttcggcatcacttaagtattgatcgaagtgttctgcttcaccttctaagatagcggtttcacatgtaccacaaaccccttctcggcatagacattccacatcaatatttaatgtctcgatggcttgtaaaatagtctggttactttgtacttcaatttcctgattagatttggcaagtaccaccgtaaatgcttcaccatcttcaggaactgttgaggcaaattgttcccaatgaatgtattcatcgcggtaacgatgcttgttacaacaatcaatcaccgcatcaatcataggtttaggtccacatacatatacatgtgtgccttttggttgcgatgaaattaattcatctaagttaagcatgctgccttctgaatcgacataactaaatacgtgctctgcatgtttctgctttaattcatcaagtaaagccgcgtgttcaggtgaacggtaagcatagtgcagctcatactctgctccacgtgctgccagctcatccatttgaggtaagaatggtgtaataccaataccaccagctatcaagatatgtttattgcctgtttcagctagcgggaataaattttttggttctgaaatctggatttcacagccttcattgcactgatcatgcatgaaaactgatccacccttaccttccacatccttacgaacgcagacttggtaagttgataaatcttgcgtacagctcatcaatgagtaggcattagaaagttgttcattcattttgacaataatatggcttcccccactaaatcgaggaaagttctgcccatcttgacgtttgaacgtaaaccgtttgattaaaggggttagctgttccacacgagtaacaaccgctgggaacatttcataatgactcgccatattagaatccttcttttaccgcatatttttgttgttagggcttatccttaaagccctaaacacatgtatttaatggtcatgaattcttcaagaccatattttgagccttcacgcccaacacctgattgtttcacaccgccaaatggtacaacttcatttgaaattgcagtggcattcataccgaccattccatattcaagctgttctgacactcgccataaacgtgaaatattttcgctataaacatacgctgccaaaccgaagattgtgtcatttgcttgagcaaccacatctgcttcatctgtaaagcgaatgagcggcgcaactggaccaaaaatttcttcttggacaatttccattgtacggtcaacgttagttaaaactgatggttcgtaaaaggtttgtcctaaagcatgctgcttaccaccacaggcaatcttagcgcctttgctcactgcatcatcaattaactgctgtgctttcaaaactgctttttcattaattaatgggccaatttgtacgccatcttcaagtccattaccgactttaaacttttgtacttcttgtacaaacttctcggcaaaagcttgataaatattgtcatgtacataaatgcggttagcacaaacacaggtttggcctgcattacgaaacttggcaaaaatcgcgccttgtacagctttatctaaatcggcatcatcaaacacaatcagaggagcatttccgcccaactcaagcgccaattttttaatggtgcttgaacactgctgcatcagtaagcgtcccactggcgttgaaccagtgaaagtcaacttcttcactttttcatgtgaagtaaataccgagccaatttcttgagatttaccagtaacaacattaatcacaccagctggtatacctgccttttctgcaagctttgcaatcgctaatgcacagtaaggtgtttcattggctggcttaatcacgaccgtacaacccgctgctaaagctggcgctgctttacgggtaatcatggcaatcgggaaattccacggcgtaatcgcagccaccacacccacaggttctttactgataataaagcgctgctggttatttacggttggaatcacatcaccataaatacgcttgccttcttcggcaaaccattgaataaatgatgcagcatagcgaacctcgccttttgcttctgctaaaggcttgccttgctcaatggtcatgattaaagcaagttcatcggtataatcgagaaccagtttatgccaagccaataagatatcagcacggttttgggccgttaaagctttccaactttgtaaagccgtataggcagcttcaattgcttgggttgcctccgccgctcccatattaggaattgtgccaatttcttcgcctgtagctgggttactcaccggaacagtcgcatttgactgtgcagctaaccattgcccattaatataggcttgttgctgaaatagttcagtactttgtaaactcgacatatcgtcttcctaactgaagaatcaggtgtaagtcatgtttacacctgaataaatccctttgtttttattgatggtactgcgccacaagatgttggaagtaagcaataccatgctcactgataccagaacgttgcttgtcagtcatgatacggccttgaccacgataaccacgtgatttcaaaccacgttgtacgctctctaccaagttcaaatcttccggacggaatacattgcgataccactcaatcaaatctttttgatcttgagtcagttcttcgttagtgaagtaaatatcgtaatgctgcaaagttgtttctgcatcaacagggaattcataaataactgtcatgaagttactgcctggcggtacgttgaacatggtgcaaggccaagtccagaaaccatgaaactcaggatctgttactgatggatcaagtttgaatgacttctcagatgaacgtgcaaagccatattgcaatgtccagttttgatgagttgtatgccagtatttatcgacttgtacagagtcagcaaagcccggatgtgcaggtccacagtggtagcattccatgtagttatcaacaatcactttccagtttgctggtgtttctgtcacaaagcgtgctgccaattttaaatctttaatcacaccacatgcttgatttaaacgttcagcaaagcccggcagctggtcttctacgcaagtcgcattttcatccatattaataaatacgaaacctgcatattcttcgacttttaaaggcaccatgcttgagttttctttatcgaaagattcaacgtggtcacagttacgtgccaatgccaagctaccgtctagcttaaacgtccatgcatgatatgggcaggtaattacattttttgctttaccactaccgcttaaaagttcatgaccacggtgcgggcacacattataaaatgcgcgtagaacactatctttaccacgaatgatgacaatattttcaccaatcactttacgggtaatatagtcatttggctgagccaactcactaccatgtgcaacgcagatccagcttttagcaaagattgcctctttctcgtgctcgaaaacttgagatgaagtatagaaaactttagggaaagtccatgcaacatctgggtttgcgcaaaaatcttcaggtaatttttcaactgcactcatgtttttactccattaaattcttttcgtccaaatgactcgatattaaattgatgtcttttcgacactgccaaacatgcggcgtatcgcactcagcatgttttgatataactgttgaacttccggacagtcacgcatcagacgtaaactgccatgtaataaacctttgcctaaatggaactcgttagggatacctgcttgttccaatttttgggtaaggaaataaccgtcatcacttaaagggtcatattcagcaacggctacaaaacttgtaggcatatctgaaaagtccgtcgccaataaaggggctagacgtaaatcctgccaatcttgtgagtccggagcatattcctttaaataaaaatgcatatcttctgtcgttaacaacggcgcatgggcgtgcttttgtgcggatgcagtatcaaatgctgtcgttaaacatggataaaccaatgccagcccttgagcttgtaaaccactatgttgtagttccactgcaagggcagctgctaaattaccgcccgcgctatcgcctgctagaacgatattttcactatcgatttgccaagctgaaccatgttgtttaagccagtgatagactgctaaacaatcttcaaaggctgctggaaagcgatgctctggtgccaagcggtaatccacactaataacaaccgcatttaagtccttacacaaataactgataataaactcatgtgaatcgagtccacctaccatccaaccaccaccatgtagatacaacacacatggccaaccagactcaggtcgatttgtttttggtaaatacacacgaacaggcacaggatgctcttcatttgcaatcactcgatcttctacatctaacttgtcatcacgtggcaaagtgtagtgtcggcacatggcatcatatgccgcacggactgagtcaatatctgcatctgctggtgaataaatgctgctccagtacacaaggctttgcatttcttcacttaaggcataagtagcctgttcatatgtcgtcattaccgttccctctagctggtttttctatccagtttgattgagcttgcaagctcaagctgcatccgttttgcatgttcatcttgagtctggtttaaaccaatttcctgatcatcataaccttgttgctcaattaaatgtgatgggactttggcataatcctgtatgagccatttcactaagccataggtctgaatcagaataatcacgatgaatggtaaagccgtcacaatagttgccgttttcatggtgtctaatggtgctttactaaagatcatggcaattggaactaaggtcagcatgacacaccagaacagacgtgcatttggcgatgggtcttgcccttcacttaaaccgcgtgtacatgttgctgaaactgcatacccaactgcatccatatgcgctgccaagaacaccaccataatgccgaggaaaatccacatcatgagttttccggcaggtaataggctaagcaattgaccaatcgcaacctcaccaccttgttgacttaagatttgtggcacatttacagccccatgaataaagctataaacactatagttttcaaacacaccaaagatgaaccaaagaccgacactaccaccaattaccatggcaaagatcacttctttaatagtacggcctttagaaacacgcgttacaaagagtgccacacccggtgcatatgaaatccaccataaccagtagaaaacagtccattcacgggtaaacttgccgtcacccattggatcggtaaacaagctcatatcgacaaagttagttgccattaatccgaaactcattaatgaattattcaaaatgaattgagtcggaccaaagcaaagtacataaattgcaaataacactacacccaagcacaccatatggcttaaacgctgcatgcccttgtccatacctacatatgaactgagtgcgaacagaactgaaactgccaaaataatgatgaccttggtcataaaggtatttggaatgcctgtgagctgagacaaaatattggtaaatgttacggcagtgagtaccaatgaaatcgtcaatgcaccgaacatgcaaagcaagaacattaagtcgactaaacgaccaaccacgccggttgatttaaagcctgtcacagcctcaatcactgaagctaaacttaaacccttgttttttctcacatgatagctgtagcacaaagaaattgatgccaaagcataaattgcccatgcacttaaacctgagtgaaaaaatgaataagccacgctatatttcaatgcttctgctgactcaggcggtaagctcaaacctggagtttgataatagtaggcccagtccaaaaagccccagtacaatgtagaagacccaatacccgacaagatgaacataaaaatccatgacattgtgctgtattgaggttttccttctccaagcttaatttttccgtatttactaaaggcaagaccaaaagtaaaaatgatagctaaaaaagcaaacagtaatactggggttgtaaataccgatgtcgtccactgcatccacgttgcagcaatctttatcgattcttgcgaataaatcgccaaaccagcaactgaaataaatacaaacagtaggctggttacggcaagaaatttatccgtataaatttttgtgttttgattatccatatccatacatccatttttggatggcgttattccatagcgaatacgtccattttagtttgggctacacatgatgcaattgcatctcctacctcataagtttttgcctgaccgccgatatcggctgtttttggaccattaattaatacattttcaatcgcctgcataatatcttgacccgcttggatacagcgctcgtcttcttcaccaaagaattcgaacatcatggcacccgaccaaatcgcagcgattgggttggcaatttgtttaccgtaaatatctggtgccgaaccatggacaggttcaaacagtgatggaaattttctttctgggtttaaatttgccgatgcggctaaaccaatggttcccgtacatgcaggacctaaatcggaaagaatatcgccaaataaatttgatgccacaaccacatcaaagcgttcaggttgtaaaacaaaacgagccgctaaaatatcaacatgctgtttatcagcttgaatttgtggatactgttttgccatcgcatcaacgcgctcatcccagtacggcatgctcactgcaataccatttgacttggtcgctgcggtaatttttttcgcatctcgctgatttgcaaactcaaatgcataacgcaaaattcggtctacgccatgacgtgtaaatacggcttcttgtaaaacaaactcgcggtctgttccttcaaaagctttaccgccaatcgctgagtattcaccttcactattttcacgaaccacgtagaagtcgatatcgcccggttttttacctaccaatggacatttcacacccggcattaagcgcactggacgtaaattcacatattggtcaaaaccacgacggaactggagcagcgaaccccaaagcgaaatatggtcaggtactttatctggccagcctacagcgccaaaataaattgcatcgtagccctgcaaagtttcaaaccagtcatctggcatcattttgccgtgctcaaggtagtaatcacagcttgcccaatcgaaagcatctaactgaagatcaatgccgtacttctctgctgctgcctttacaaccttaataccttctggtagaacttctaaaccaatgccatcgcctgcaatcgtggcaactttatatctttttgccataagcttccttcacaccttcgactaatatccttgtatggcttaaacatgatgttttaagcaaaaatgatcaacaacagaactatcactccaatggacacggatcgtgaataatctacctaacctatcggatttaaaggttttttgcacagtcgccaaactaaaaagttttgtcgaatctgctgaggaactcgggacatcgccagcttttattagcaagcgaattaatattttagaaaacacgttgagctgcaaactttttcatcgcagtacacgtcacgttagcctgacagaagatggcaaactcattcttgagagagtttcaaatattcttgaagaatttgatgaagtttgtgaactggtcaataacccactcagtacgcctacgggtcgtatggatattattagtagctttggttttggcagaaaacatgtcgcaccaattttgtctaaattaatgatgctgtatccaaaactacagattcattttgataccatcgacaataccaaagacctgattcaacacagtattgatttagacattagaattggtaatgaaattgcacccaatatgattgcgaagaagctggcttctaattttcgtattttgtgcgcgtcaccgagttatttacttaaacacggcgtacctgacagtattgaagatttacaaacacatgactgtttaacaattagtgaacgcgaccaatcctcggttttatggaaatttaggcatgcttccgaagatgtctcagtgcatatcaaaccccgctttgtttcaaataacggcgaaattattcatcaacttgccatagaaggtcacggtattattttccgttcgatttgggatgtagcagatgaattgatcaccggccaacttcagcatattttgcctgaatactggcaagatgcagatgtctgggcggtttatccatcacgactcaaaagctcctccaaactgcaaacctgtattttgtttattcaaaatgaattgctcaatcgtttacagcatgtgcaaaacctaagccgtggacaactcatttcaccagccgtcaaacgagaaccaccgcctgaaaaagtctttctataaaaaaaaccctaagtgggcctgttcacttagggcaatagtttacttttaacttttagaaataatatccaattgaaagataaaacagtttatcccaatcattactgctaccttgtgcaaggccattcgccccaccacctaccattggatcatttttactcataatatattcaccctgaataccaatggctttgtaattaaaataaacgcctgcaattaaacgctcagagtctttatatccatcctcatctttgaaaaagcggctatgagagatatagggcttaatattttcaattttgtggaatggctgagcaaaggtatagttaatttcattgactagatatttgcctttgttagcaacttgatacggataatcaaatgctccaatggttgagctatttggcaataaattatcgccattagtgacatcttgcttacctgctaagaacatccattgccatgcttgatattgcgtttgagcaaatacattccatgatttgcggtgtccatcttcatctgttcttttattttctaaatctgaataccaaactgaaccacctaactcggtcgaaaatttttgagctttatcaagctcaaattttctagaggcccgcgcaatccacatatttttttcttcaatattggtccctaccgtcaagtcatcagcttcaacgaaattaccactatatcggcttgagtcttttgatgtccccttataatttcctccatcagttggatagaatcctaaggttaaattgtatttgtcatctgcaaatttatatttaatccccagattatcaatatcttctaaaccaacggtatttaaaagcgtttcgtaataactacttccccaaaattcaccaaagccaaaatcaacaggctgcaaacctgccgtgactctttgttggtcagataacttataccctacccaagctttttttagaaaaatcgcatcacacaagcgatcatattgataacagcgagcatctgctcctgcaatccagtttggattttcataacccaacactaatttaatatctgtgagtcgccagtcatcattttgggaaccttcattcgccccgaccacataatctttatgtaaatagcgagaacgtattgcaccagacactttaaattgacccgaatctaaagttggatcaccccaactcaaatcagctgcagagacttgtgttccagcagttaaacttagaattcctaaaaataataatgaccttttcatgtcttcaacatccttgttaagtgttataagaacatgaagaaattggcttagacaaacaatgccagaagtatgaagtcggtctttacaaactgtgtttaatcaaaaaaacaagcataaaaaaagaccacgcaggagcgtggtctgtaaaatggtggctatgacgagacttgaacttgtgacccccgcattatgagtgcggtgctctaaccaactgagctacatagccgtaaactgtgcgcgcattatcttagcttcttaaccgcgcgtcaagaaaaattttcaataaaatgaggtgaagtgagcctataagccgggttctgtcgaggatggtcattcctctaggcgtacaatcactcatacgctcaagcgacctacccgaatccagtacgggccgcacctaggattcctatttggtcttgcttctggtggggtttgccatgccgtgaactgttaccagacacgcggtgcgctcttaccgcaccctttcacccttacctcacgaatgaggcggtctactctctgctgcactttccgtcggctttcaccgcccaggcgttacctggcaccctgccctatgaagcccggactttcctctcctgcttcagtcacggagacctccacagcagcgaccatccggctcacttcgagggcgcatattaacaaatttattgactaattgcttgtgcttttttgagcaattaatcttttatatttgtcgagtaactgttcttccgtttcctcatgctgcggatcttttggaatacagtctactggacaaaataattggcactgtggctggtcatggtgaccaacgcactctgtacataaatccggattgatttcataaatcacttcgcccataaagatcgcttcattgggacaaactggttcacaaacatcgcagtttatgcattcatcagtgatatataacgacacgttaccaaccttgttgatgtttacgttcaaaggcttcaaccacagcttgcggaacaaacttggttacatctccttttaaacgagcaatttctcgaattaatgtcgaagaaataaaagaatactgttcagaaggtgttaaaaacaccgcctcgaaatgtggatcaagctgacggttcatattggccagttgaaattcatattcaaagtcagaaactgctcttaaaccacgaagtactgctgtggccttttgttctttaaaaaaattaaccaacaaaccatcaaaacctacaaactcaacatttgatagatggcctaatgatgattgcgccagtgcaactctttcttctaagctgaacaaagggtttttatgatgtccaattgcaatcgctactacaacttcatcaaacattcttgatgctctagtaactaaatcaacgtgcccattcgtgatagggtcaaatgttccaggataaattacacgcgttttagacatccgctagtactctaattgtattgtgcgcctattttagcaaaagttatacatgagacgaaatattgatatgtgggaaaaaacttcaccttggcatcagtttacggcacaatagggacaattgtggaagtttgaattatggcgaaagcaacagtagtaaagaaacataatggcggaaccattgcacaaaacaaacgtgcccgtcatgattattttatcgaagaaaaatttgaagctggcatgtctttactaggctgggaagtaaaatctttacgtgccggtcgtatgagtttgacagaaagttatgtcatttttaaaaatggtgaagcattcttatttggtgctcagattcaaccactcctttctgcatctacacatattgtgccggaagctacacgtacacgaaaattattattatctcgtcgtgaacttgaaaagcttatgggtgcagtgaaccaaaaaggttattcgtgcgttccattagcatgttactggaaaggtcatctggttaagcttgaaattgcactcgtgaaaggtaaacaacttcacgataaacgagcaactgaaaaagaacgtgactggcaacgtgataaagcacgtatatttcataagtaatagactaaaaagcctctttatagaggcttttttatttttcactaatttaatctatataaaagcccagcaatatattcaccaaaccatttagccgtatctaaatcaccttgcggcggtgtaatttcaacaggtgcattatctgattgagtcatcaaccctaaacagctcgataaacggtttaaatcggtttcagtatggcctgttgtcattaaaggtaaacctgaccacaacatgccgtgctgcatcgcaaaaatattaagttgttgcagaaccgccagtttatcaccacttaaaccgcccgaatttgcaaaacccgctgctaacttaccctgccataaacgatttttccaacgtttagatgtactatccataaactttttaaaatcggcagttacgcttcccatataagttggggaaccaaaaataatgccctgtgaggcatctaaaacatcccaatcaatatgctcaatattcatcacatgtactttgacgcccatcacttcggcgccacttgcgatagcagacgctacctttgcagtgtggccatagggactgtgatagacaatagagagatgtttttcaggcaaagacataagcttaatattttgagcgattttttctattttatcattttattaaaacttgctaaaccttcctctataaacatgaaatctcagtacttgccttaatttcttgaataaatatggaaaattcaaaataaaaaactctcttatgctattttgaaatttaaacaacataagagagtattattaaaacaatcatatccttaagaagaaatatgatttttcaaaactacataaaaacaaaagttgccatacggccagttttagcgtcacggcggtaagaaaaatattcatcttgctgttggtatgaacactgatctccccctaaaactttttcaactcctaggctctgtaagataaaacgagcaattgcatacaaatcagcatgaaatttatttggagctgccccatcaataaatgtagtttccaattcaggatatttactacaaaaagcagtttttacctctgctccgatttcaaagcaaggttgactaatcgctgcacccaaccatgcccatgttggagggttctgcattgcagcaactgtattttcaataatacctcccgctaaacctcgccaccctgcatgtaagttagcaatttctgtaccttcagcattaccaagcacgacaggtaaacaatcggctgtcatcatcattaacgcatgacctttggtttgcgtaatcaagccgtcgccaattaaagctgtaaaaggaatttgttcatttactgtatggcaaatcgtgctatgtgtttgggtcatccatgtcatttttttaaccccaaactgagcaaattcatctaacagcatcatccgatgctgctggacacgctgagcttcgtctttaacgtgcaaagcaaggttaaaacctgttagctctgtttgctctgctggtaatgccaaagggtgatgaactcgtgtctgccctacgaatacgccttgaggtaaaccctgaacaaattccatataccagtccttaatatgcagcgttttctgtacgtaaaacattaaccaactgcgtaaaatcttcaggccatggtgcttcgaataacatttcttcaccagtacgaggatgttttaagcccaatttagcagcatgaagtgcttggcgtttaaaaccgcgtaaagtttcgatgagtaactcagatgcccctgccggaatacgtacacggttcatataaacttgatcaccgaccaaaccatgtccaatataactaaagtgaacgcgaatctggtgggtacggccagtctcaagttgcgcttgtacacgggtaaagtctctaaaacgctctttcacgttatagtgcgttacagcatcacgcccacccggcaaaattgccatttttacacggtcaaccggatgtcttttaatcggctcatcgattgtgccacctgcgataatattgccataagtgactaagtcataaatacgataaacagatttatctcccaattgtttactcaaagaaaattgtgcttcgagatttttagcaacaactagtaaaccactggtatctttatcaatacgatgtactagaccagcacgtgaaagctcggctgacttaggtgaatggtaaagcaaagcattgaccaaagtacccgaggtattacctgcgccaggatgaaccaccatacctaccggtttattaatgactaaaatatcttcatcttcgtaaacaatatcgagtggaatattttctggttgactgttggtctgtgcttcaagctcaacatttaaagttagcgtttcattgccttcgcagcgatatttaggtttgacaatgttaccatttaccaacagatgaccttctttcatccattgtttaagtttttcgcgtgaaaactcactccacagcatggctgccacttggtcgatacgttgccctaagtagctttcatctaactgaacttgcaacgataaacgtgttgcagttgtatcagaagtatggttatctgcatcctcagaatcttctagtaaattgaagtctgtttcagagaagtttgtgtttgaagattgtgctgaagtcatttgatcatttagataaaagtggtttaatagcgcaattgtagctcattgcccaacataacagaggagtttttatgtcgctaccacgttataaaattacgatgcttgccttatctttaggtgtagcgtctgcatttgtgggctgtagcagcaatccaagtaaaaaagaagtggtcgatactggccctcaatctagtgaacaagcatattttgacaaggctcaaaaggctcttgatcgtggtcaatatcttgacgctaccaaatctttagaagcgattgatacttattatccaactggacaatacgcacaacaagcacaacttgaacttctctattcaaaatttaagcaaaaagattatgaaggtgcgattgcactcgcagaacgttttattcgtttaaatcctcagcatccaaatgtagattatgcttactacgtacgtggcgtatctaatatggagatgaactacgatagcttgttgcgttacacctctttgcaacaatctcaccgtgatgtgagttatttaaaagttgcatatcaaaactttgttgatcttatccgtcgcttcccaagtagccagtattctgtcgatgcagcacagcgtatgaagtttattggacaagagcttgctgaaagtgaaatgaatgcagcgcgttttaacgttaaacgtaaagcgtggattgccgcggctgaacgttcacaatgggtgattgaacactatccacaaacacctcaagtaccagaagctttagcaactttggcatatagctatgatcaattaggtgataaggcaacttcgcaacaatacatcgaagttttaaaacttaattatccgagccttgtcaataaaaacggcactgtcaacatgcgtgctgcacgtaaagaaggtaactggatcaaccgtgcaaccttaggtattcttggtcgtgaatctaagtctgtaacacctgatacgactacttcttctgaagctgaaccaaaacgtagtctactaaaccgcgtaagctttggtttaattggtaactcgggtaaagaagaagctgaagaaacaactaacacacctgttgaagcaccaaaaagtgaacgtagttggactaatcgcttaagcttcggtttactagataaacctgagccaaaagcagcagaaggcgcaacaattgcaccagcaacgtcttcgagtgaagcaccgagtgcctcaccagcagataacgaagcagatgacgctgctcaataagcaataaaagcttaaaaataaccaacaaacaggcaagtaatatcacttgcctgtttgtttttataaaatagtaaaatatttatcgggcatatctcgattcatcatgtcagaataatctgacctatcgcatcattagtttaaacacggttatctgaattatggcaattccacagcatacgattgatcagatcttagatcgcacagatattgtcgatctgattggtcaacgtgtgaaactgaaaaaaaccggacgaacttattctggttgttgcccttttcatcaagagaaaacaccttctttccatgtttaccgcgataaacagtattatcactgctttggctgtcaggcgaacggaaacgctattcgcttcctaatggacattgataaccgaaactttattgatgtgatgaaggaattatcgagtaatacgggagtcgaattaccaaaagataatactgataataaaaaactgtcttatacgcgccaagttacaaagccatcaacaccgcccaaaacggttgctgaaccgactactcaagcacctatagaagatcagtacaatacgtttgaacccgtatattttgatgatccctttgcccagtttgaacagccatttagctttgatgagccagtacaagaaggtaatttatatgaccttctagaaaatgttgcccagttttacgaacatcaattaccgactagtcaaaaagctaaaaattactttaagcaacgcggtttaagtgaccagactattcagttctggcgtttaggttatgctcctgaagactggcagcatctagaaaaagctttcccttatgatattgagggcttaaagcagcttggcctcatccgttcaagtgacagtggtcgtgacttcgaccttttacgtgatcgtgttatttttccaattcgggaccctaaaggccgtgtagttggctttggtggtcgtgcgctcaatgatgaaattaagcctaaatacatcaactcgcccgattcggaagtattccataaaaatcaattactgtatgggctatacgaaggccgaaaattaaaagcaaatgactggttaatggtcgaaggatatatggatgtcattgctttacagcaatatggcattactggtgcagttgcgactttaggaacggcaagtaataccgaacaccttaatatcttatttaaacaaaataaccggattacgattgcttttgacggtgatgctgcaggtcaaaaggccgcacgccgaactttagaaattgcattacccttactcaatgatggtcgtgagctcaaattctttgtattgccaaatgaccatgaccctgactctttaatccgccgtgaaggggtggaaaatttccagaagcttctacagcaagctcctttactttctgactttgtttttgctcatcttactgggcaacatgacattagtacgcccgaaggtaaaagtcttgttatgggcgaattaagagaattgactgagttattgccaaaacaagggtcttttcgctatctactaacccaatctttccgtgaaaaattaggcttaggtaagcgtttcactccacaaattagccacgatgcatccctatcttttaatattcaaacgaaagatgaagactttgcaattgcaattttgatgcatcatccgtttctttatattcattttgaaggattacgggcttatattccgcaagatgagttgttggctaaaatattagcaattttaaaccgtatatttgacgaattgcctgatgaccaagaactagctacctactatgttttaggtgcttgtagcagttattgccatgaaattgcagatattatgcaaaggaccaatattcaagccttaactcaagcaccggaagtagcagataaactcgcaaaagaatatgctttaggcttacaagaaagatatttacgtcaaaaactaaaatctaaaatctcattagttgagtcaagaaacttaagacaacaactcaatgaacttaccaaacagattagcttaagacttctttcttaacgtttgggttttcgctcatgatcgaatacatcctgtaaatgttgctgtaaccattcaaaatagtccgggctctctgcttttgcagcttcacgcaacaacatagaggtcggatgtattagtttttgcgtcaaacgatgggcaaattgctgcaacacttgctcaggatttccaccatgatgcagagcctctaatgcctgggtaagctctcgctgactaatttcttcactatgttggcggtaagcatgaattgtactgcccgcctctttgactttttgatgcgtaattagctgggtggctagctgattaaccatcacctcagcttcaacagccgcttgacgacgttgagccaagttttcatcgatcacactttgtagatcatctacaccgtataaatacaccccatcaagcgactctactttagggtcaatatcacgcggtacagctaaatcgaccattaacatttgctgataacggcgtttttttaatgcagttttgacatctgcataagcaataacctgatgcaaactacccgtacaacttgaaacaacatcggcacgatatagattctcagccaaatctgaaaaatcaataatctcaacttcaacttgatgtgcaatttcttgggccaattgatcggcacgttcacggctacgattacaaataatcatcttggcgacgcccatttcagctaaatgcttggcaacaaggctgttcatttcgcctgcagcaaccaccataaccgttagtttttcaggtttactaaaaacctgtaaagcgagctgggcaactgcataacccattgaaacggcatgactacctacagctgtttcagagcgcacacgtttagcggcgtaaaaagcgtactcaaatacactatttaattctggagaaactgtttgcgcttctttagacaatgctagagcacttttcacctgccctaaaatttgcggttcgcccaacatgagtgagtccaaaccacttgctacacgcattaaatgtgtgatggcttgagcattttcgtaacgataaacatgatgaattaactgctttacatcaatattattggcatcagctaaccatttcagaaggctttcggcatcttccgccatggcgtagacttctgtacggttacatgttgagacaaccactaagtcttttaaagactcgtgatgacgttgttcggcaagcaaattacttaatcgctctgcattgaaagcaatttgctcgcggagttctacagaagctgtttgatggttgacacccaatgcaaagaaagacatatcagatcatcatttcgctaaatttatgctattgtgcaacatcggtgtcataaaaagcattactttggatcaataaaaattgcgtcaaatgaatagccgtattaattttaacggtgcttcgataagacagtattctaccacattcttattgttaggtagcatgtcctcatatgtctatgcacgtccagtgcaagagacctatgccgtgcattcatttgatcaggctttacagcagagtatggttgctgaatttgccttagcttatgacgatattcccacagcactgcacaattacacagtgcttgcgataaaaagcaactcaacaacaattaaacagcgtgcattagacgttgcacttgaatataacgacttacaagctgcattaaatattgcaacacattgggttgttcaagagcctaaagatgtccctgctttattttatttatcgcatattgcgctaaaaacacatgaatatcagcttgctgccgagactttagataaaattttaaaaatagatccaactgccgatcttgaacaaattttggcaagcattgcacctgaaaatgcacaggatcgagaagttttattaaccgctttacgttctagtgcagagaaagacaacccatccatcttagcgcttattgccaacctagaagcacaaaatggtcagttagaaccggccttaagtaccattaatcgcgcactacgccgtcgccctaaagtgaccagctttatcttaatgaaagccaatttactaatcgcactcagtgatcaggaaggtgctttaaaatggtatgcaaaatcaagccgtaaatataagaaaaacctagacattcgcctagccgaagtacgttacctcatccagattaatcaaccccagcttgctcttgaaaaattagagaaaattattcaaagcaatcctcatgctgaagaggctttgtttattgctggtttaaccagtattgaccttaagcaatatgataaggcagaacaatatctggttgatttacgcaactctgcaaaatatcaaaatgaggcgtattactacttagcgattaatgctgaaagaaaacaacattatgaaactgctaaagcttattaccgtttagtcgatggtagtttgtatattgtttcaagacgcaatctcattgcgatctatgataaacaagaaaacttacacgacgctttacgctttttaacccaagaacgagtcaattatcctcagcatgcaagctttctttaccaagctcaagctgaaattttaaagaagatgggcaataaaaaagctgcattaaatttattagatgaagcgatcaaaaacttaccagatgatccggagctcatctatgcagaagttttattattagacccttatactgaccgcgataaactcgataaaacactcaaacaattattgcagttagaacccaatagcccaacgtatctaaacgcctatgcttatacattagctttgcaaaatcgtaggcttaaggaagcacgtcaatatgctgaacaggctttagaatatgcccctgaacaagcttctattctggatacgctaggctatatcgcatttttacaaaatgattatgaagcggctgcggaagctttaggcaaagcatatgaactaagtcataacataaatattggcattcgttacgctaaggcactttatatgcaaggatcattaactcagttcagtgccgtgttacaacaactgaaacaaaagcacgcaaatgatccacaattacaacaacttgatgcgttaattttacctacatctgcaaaaaagagttaaatttatgagcaaacttgcccaactgtgcacagcgatctgtggatcaagtgttttatttttaaccggttgtcagcattttactcaacctaaagctgcagttacccaccaagtacaagacgaaaaacacttcaatttacaaggtaaaattggagtacgcaccccccagcaaactggtagtgcattctttacatggattcaacagcaagacaatttcgatatcgaattaagcggtattttaggtgttggaaaaacacaaatacagggtaaacctggtgaagttactctaaacagtgctaaaactggactgattacggctgcatctcctgaagaacttttagagcgtgcaactggctggcaagcaccaattactcatttaaccagttggattttagcgaaacctgcaactttaaatgctcaaattagtaaagataatgcaaatcgtgtgagccaactcatcgaagatggctggacagttaattttagttatgatggtgaacaaactctaccaaataaactgattttaaagcaggctcttgctgaagataaagaaaaccgtattacaatggtgatccaaaaccgctaatccttacttatataaatctatgattcgagtaccttctccagctaagctcaacctgtttttgcatatcacaggacgtcgtgaaaatggttaccatgaactacaaactattttccaacttattgatttatatgactggatgacatttacgcctatatctgaagatgagattcagattgaaggtttaggtgaggttcaacttgagcaaaatctgatttatcgggcggcacagatattacgccctcacgctcaaaatccttgcggactccatataaaaattgaaaaaaatattccgatgggtgccggtttaggtggcggttcttccaatgcagcaacgacgcttattgtcttaaatcaattatggcaatgtggtctaactgaagaacaattagctcagttcggtgtcaagcttggtgccgatgttccaatttttatttatgggttaaatgcatgggctgaagggattggtgaacatttatcattcatagacttagatcaaaaacaattcattgttttaaaacctgattgttttatcagcactcaactgcttttttcacaaaaaacattgacaagagattctaagcccactacattttgcgcctatcagttagaaccttctaatttcggaaataactttgagcctttggctagagagttataccctgaagttgaagaagcaatgcaatatctcgatcagtttggtcatgcaaagcttacaggtacaggtgcttgtgtttttgctgaggtaaccgatgaaatgaatgttgatgacattcttaaacatgcaccatgtaaagcttacttggtacatagtttaaaagaatctcctttacgtcattttaaagttgcaagttaggggcgtcgccaagtggtaaggcagcgggttttgatcccgccatccgttggttcgaatccagccgcccctgccattttccacctgtaatgatgattgtattaggggcgtcgccaagtggtaaggcagcgggttttgatcccgccatccgttggttcgaatccagccgcccctgccatcttaatacagcatcgaatttaggggcgtcgccaagtggtaaggcagcgggttttgatcccgccatccgttggttcgaatccagccgcccctgccattctcttatttaaaagacagacttaattgccttgctttttgttgattaaccttgacattgcattgcaaaaatattaaagttctgccgcattaggggcgtcgccaagtggtaaggcagcgggttttgatcccgccatccgttggttcgaatccagccgcccctgccatctacttcattacataccaaccgccaagggtgcttcatgcccaatcttgtcgtttttagtggaaatgctcatccacagttcgctcaaaaagtcgtaagtcacttacatatccctctaggtgctgcatcagtcggtcagttctctgatggtgaaatttcagtagaaattactgaaaatgttcgtggtaaagacgtatttatcgttcagcctacttgtgctccaaccaatgacaaccttatggaaatcttggttatggcagatgctttgcgtcgtgcaagtgctggtcgtattactgctgttatcccttattttggttatgctcgccaagaccgtcgcccacgttctgcacgtgtgccgatcacagcgaaagttgttgcagacatgcttaccactgttggtattgaccgtgtcgtaatgattgacttacatgctgaccaaatccagggcttcttcgatattccagtcgacaacatctacggtactcctgctttgcttgctgacttacgtcaacaacaacatgacaaccttatggtggtttctcctgacgttggcggtgttgtacgtgctcgtgccgttgctaaacagatgggtgatatcgatttagcaatcatcgacaaacgtcgtcaaaaagccaacgagtcgcaagttatgcacttgattggtgacgtaaaagatcgtgattgcgttatcgtagacgacatggttgatacagctggtacattgtgtaaagcagctgatgcgcttaaacaattcggtgcacgtcgtgttgttgcttacgcaactcaccctgtactttcaggcaaagcaattgagaacttacgtaactctgttattgatgagttagttgtaactgacacaattcctctttctgaagaagcattaaacttaggcaaaattcgccaagtttctgttgctagcatggttgctgaaacgattcgtcgtattaataacgaagagtctatcagcgcgatgttcgatagtttataatattgcagcttttttcttaaccctagctttggctggggttttctatcactaaactggtcgcaagtttagtttatttaatctttaatgaggatttatctcatggcaaacttcgtattaaacgctcaagcgcgtgctgaagacaaacaagggaaaggtgcgagccgccgccttcgtcgcgaatctttagttccagctatcatctacggtggtaacgctgagcctgtagcagttactttagaacttcgtgagcttgtaaaagctttagaaagcaacgctttctttgaagaagttgttgaaatcaaagtaggtgacaaagttgaaaacgttaaaatccaagcgttacaacgtcacccagctaaaaacactcctatgcacgctgacttcaaacgcgcataagtgtttaaaggcgtagattagtgtcaaatatttcgctaattgttggtttgggcaatcctggttcagaatatgcccaaacccgccataatgcaggtttctggttcgtcgaacagcttgcagataaatatggcattacattaaaaaatgatccaaaatttcacggaatcagtggtcgtggtaatatagaagggcatgatgttcgcttacttctacctatgacttatatgaatcgttccggacaaagtgttgttcctttctcaaaattctatcaaattgctcctgaagcaattttgattgctcatgatgaacttgatatgaaccctggtgtaattcgcctcaaaacaggcggtggacacggcggtcataacggtttacgtgatattgtcccgcatattggcccaaattttcatcgtttacgtattggtattggacatcctggctcaaaagaaagagtttctggacatgtgctcgggaaagcaccaagtagtgaacaaagcctgatggatggagcaattgatcatgctctctctaaagtaaagttacttgttcaagggcaagtaccacaggccatgaatcaaattaatgcgtataaaccagcttaaattgttgaacaatcaagcttgctatcttgcttttttaggagcaaaatgcgcatcagccacctagccggcggcaaaggcgaaagatttcaccataagatcttcatcttaggtctactcaggagacgctagccatgctatctcgtttattaaaatgcaaaattcaccgtgcagttgtaacccatgctgaacttcactatgaaggttcttgtgcaattgatggcgtattgatggacttagctggtattcgtgaatacgaagaaatccacgtttggaacgtaactaatggcaagcgcttcacaacttacgcaattcgtggtgaagataactctggcattatttcagtaaatggcggcgctgctcaccaagcagatgtgggcgatttagttattattgctacttttggtgatttcacagaagctgaagcaaatgcccataaaccacgcttggtatatgcgaacccagataacacagtcaatcacacagcgaactgtattcctgtgcaagttgcctaattaaagatttaaaaataataaaaagcccgtaaatacgggctttttttataagactttataaacttctggcagttcccttccaccagctctgttgctgcttacaatttagaggctgtagctcttctccacgtaaatcaaataaaatcgcctctccttttgcatttaccttaaattcagcatatttcgctttctcatagcaatgagctaagccttcggcaaataagaaactgcgagaagctgggtacaaagattgatagtgattgtccggattttttaaaattaaattctgctcattagataaagagttagggtctaaaatagtacggattactcgatttcgtgaatctaaaataacttttgctggaacagaagcatgattaaaaatcacctgatctaaagcttcactttcacttcctgtcagagctttgagagattgtaaatttaattcataagccaacgccatatagtccccttgtaaaatagaacgaggatcaactggtttcagcttaataaaaatacttttactctgatgcaggtgccattcatttttcatcactaaacctgcaaaaaataaaacagtgactattgcaagcataagagagaaatactttttcattacttttctccctcaatacaattaattttagcttctttcataagtagcccatatagagccagcaatataatgcccgacaccaagattgatgcacttttagctaaaaaacttaattgtaaactgtaataaagttgccaaagcacaaaggcaaatactacgagcgtaacaccataaacaatgcgatctttattttttaaagcccatgtcaaaataacaaataagatgaatacttcaaaatagccgagtgcaataagtaatatgccaaaaactaaaaaggcaaaaaaagttataccgtgaagttgccgatagagatagaaaaaactaaagcataataaccatacgcacggcaatgcataaaggaaccatagtgactgatcagccgaatcaacaagtgctaatcctataaaggtatcaaagaatgaactcacccaaattacaacgagcgtacataagaagatactccgcttatacgatacgaccgctttacttcctatcagtagtaccgagctaaaaaccaaatagttaagtaagactaaatttaaataagtctgagtagagtttaaggaccataatgaatgatccatttgtagtagatagattactgctataccataagttgcaagcatttgaattaaaataaagaaccagtgaggcttaagaaaataactaatacataaaataaagatctgggcaatcaatacccataaaatttgatctgtttcagaaccaagatggaataaaaaagcagtctgtccactcacaaataaacaatatgcaaactgccggatgaaataactttgcgattttgttagtaaagttatagctacagcaacaaagatgattccaataattaaggaaatagtctcccaaaacaccaaagtaaatgctgcaagcgctagaccagcaagccaagcaccaattgccaaaggaataatataaaaacggctttgacggaaaatcttgattaagaaataactaatgagtgcaaaccaagtaaaaataatccccgcgatcaataaaaagatgaactcattagaatctttaaatagttgattaataccatccacaagccatatggtcgccgtcacaccaagaacagcagccattaaactggcacacaactgatcatctttattaaaaaaataataaaaagcgatgattcctagaaaaaaagccgagatcagataagataaattttcacttgataggaattgaatcattcctgttattgaaataacagcaaaccaagcaataaaaataaaacgtaaagccgtatatttcttttgacagatccaaaattgcacaagacttaataaatttagagcaaaaagataaagatagggaaacttctctgcccagaaagcctgtttaaaaaataaaaacagggtgagttggcttgtaatacaaattaaagcaaagattccaatatttggtcgatatagccacggcaataaaagcaaagtccaaatcaagaaaagtaaataactgtctgcaccagtttgataaacttgcccaattacagccaaactcaaaccgaccattaagccgcagatgccatgtaaagtttgccttactccctcacttaaagtcttcttgacactcacccaagctgtaataagtaatataacaggtggaataatgagttgaatgctatctggaagcatcaaccaattagcagcaattaagtgcagaatactgagcgccataaatacataactgaaaatatggagatgctgaataaataaagtattcctaaaaggataataatctcttatctgcatgaaacacctgttttatttataattttctagaaaaaacataacattcacttttaagctcaacaagtaagctcttgttaaaaagcctattttaatttatgaaaatacttattcataaagagacttagcattctacaaaagcatctagccaattttgccaagcgcgctataataaaacccatcgcttcagggcggggtgtaattccccaccggtggtaaagttaatttttattgttaaattaacaagcccacgagcttaaattatgtaatttgagcagatttggtgaaactccaaagccgacggtatagtccggatgaaagaagacgacgaactgaaataaatccattttatttcagtgccagcctgtttttgcatcagtcctgaaatgttcaaccgtattcttacgagagcgtttcattatgtctagtttaattcaaccagaactttttttctcagccctctctcctgctgagcaacgcattcaacaagcattagaagatatccgtcaaggcaaacctgtcttggtgatggatgacttcgatcgtgaaaatgaagcagatttaattgttgcagcagaaaccctaactgttgagaccatggcacgtatgattcgtgatggctcaggtatcgtatgtttatgccttactgaagagttagctgatcatcttgaacttccaccaatggtttctcaaaactcaagtcagtttcatactgcatttacagtgactattgaagctgctcaaggcgttaccactggcgtttctgctaaagaccgtgtaacaacgattaaaactgctattaaagatggtgctgttgcaactgatcttaaccgtccaggccatgttttcccattacgcgcacgtaatggtggcgtgcttacccgtcgaggtcatacggaggggactattgatctagcaagattagctggtttaaaacctgctggagtgttatgcgaattaaccaatccggatgggacaatggcatcaggaattcaagttttagcatatgctcaaactcatcatttaactgtgattacgattgaagaacttgttcaataccgccagcaacacggtatttaaaataaataaaaaggtttgacttgttcacttgcaggtcaaacctctaaattataattcttgaaatttaagaaactttcttttgtgcggcctgttcttcaacataatctaaaagttcagaaaattttgtaatctttgctttaggttgtgcttgagtaagttcttctggtgtcccataaccataagtcaccgctaccgcttcaataccattatggcgggcgcctaaaacatcatattgacgatcacccaccatcaggcattcttctgggtttaattgctcacgttcaagaatataatggataagctcagctttattggtccgctcacccgttaattcactaccgtaaatttgtacaaaatattggcttaattcaaaatgatctaaaattcgttttgcataaatcgttggtttagcagtagcaacgaacaaccgatacccttctgcttttaaggccttaagtgtttccgcaacagatggatatacttcattttcaaataaaccaatcaccgagaaacgctcacggtaagcaagtaaagcttgctcagctagtgcatcatcttgagtagctaataattttgctaatgacgcttttaaaggtgggccaatcgtccaatcaatatttaaatcggcagctaatggataacctaacttatccattgcataacgaattgatgtatggataccaactttaggatctgttaaggttccatctaaatcaatcaaaatatgttttatagccattcaatcactaacccagtaaagtatttaattcaattggtcgagagtttaattaaactctcttatactaacgtaaatttaaattgaaaaggaaataaccgtgcgtccaaccgtactttgtttctcgggtttagacccttcaggtggtgcaggtttacaagccgatattgaagcgattggacaaagtggtgcacatgcagcaattgcatgtacagccctcaccattcagaattctcaacaagtatttggctttgaagcaacctcaaaagaactattattagcccaagcaaatgctgttgtaggcgatttacccattaaatgtgttaagtctggcatgctaggcactaccgacaatattgcggctctagccgaatttttacgtgctcatcctgactatcaatatgtacttgaccctgtcttagttgcaaacagtggcggttcgttaggagaccaagcaactttagttaaagcatttgttgaactgattcccctagcgacactcattactccaaatacagttgaattgcgcgctttaacaggcgttaccgacttagatcaggcaacccaaaagttatttgaaatgggtgccaaggctgtattagtgaaaggtggacacgaagatacacctgactttattaaaaatagtttatatattgatggcgagcttgcagcaagtagtacatgtccgcgccttgaaggtgagtatcatggctcaggttgttcattagcgagtttcattgcaggtcgtttagctctaggtgactctttaaaaattgcagttcaacatgcagaaacatggttatttggtgtgttaaaaaatgctgaaacacctgtactcaatggacaaaagattccaaaacggttttaaccaataaataaaaaaggcgctttaagcgccttttttatattcctattattgaggaatacgtaaaacttgtcctggaaaaatctcatctggatctttcagcattggtttattcgcttcaaagattttttgatattgattggcatcaccataaaactctttagcaatttttgaaagattatcaccagatttcactgtataaaatttgctttctggctcaggagttgcaacagtcatctggtcatctacttgtgccacatgatctacattacccacaataagaatgattttttctttatctgcttggctttggacttgtcctttaataatagcagtgtcagttgagccattatatgttacagataagccttccaccccaaggcctaagcttttaatcaatcccaataatttattcgcaatttcttgtgcagaaggttctgctggtgttgctggagctgcttgtggttctgctggtgcggtatttttcttaccaataccttttacaaaatcaaaaagacccattatttagtcctcatattattgtttatagtaaagtcattaaactgacccttattgttatacttgaaaaaagagatacctctgctatcaattgaggttgatcttgtaaaaatatgtatctctatcaattatcttactcgtataaaaaaagccaccttccggtggccttcttttttaatcagcaatatgcgaattaaccaagttttttagttacatagtcaattgcagattgaactgtagtgatttcgtttgaatcttcatcagggatagtgatgtcgaagtcattttcgaaagacataacaagttcaactaaatctaaagagtcagcacccaagtcatccatgaaagatgcttcgtttttaatctcttcagctttaagaccaagttgttctgcaaccgcttgtttaacgcgttgttcgatatcgctcacaggaattctcctcattgcttgtggcgtttgatttgccactagtttaattgaatataaaaatttttaaaagtttatacatcggcgttaggccatgtataaaccaccatttacatgtaataccgtaccggtaatgtaacctgctttatcacttgcaaggaaactcaccgcatttgcgatatcttgtggctcgcctaagcgatttaaagccacttgatcactcatttttttgcgaatgtcttcactaagtgcatctgtcatttctgttgcaataaaacctggtgccacactgtttacagtgatttggcggctacccatctcttttgcaagactacggctaaatgcttcaatacctgctttagcagcagaatagttcgcttggcctgggtttgcaaagtgagctacaacagaactgatattaataatgcgaccaaaacgtgctttcgtcatacccttaagcacacgtttagataaacgataaacggctttaaggtggatattaaggatgtcatcccaatcatcttccgacatacgaagcaacaaattgtctttcgtaatacctgcattgttaacgagaacaagtacaggaccatagttctgttcaatatgagacacgactgcttcaatctcatcgagattacgcacatcgagagccaaacctgcaccttgttcaccaaagctatcagttagcttttgtgcaccagattcagaagtcgcagtacctacgacaaaataaccgtcttgaataagttgctgggcaattgcagcgccaatgccccgactcgcgcccgttactaatgcaactttgcgttcttgtgtcatgcaatttttccttctgccactaaaacagcatttagggcatcttccattttgctcttactatcaatagaaaaagctttttcaatatttggtaaacgctttgcgagattactcaatactgtacctgggccacactcaacaatgtactgaataccttggtcttgtagagactgcatggtacgtgtccattgtacagactggtacaattgtgctgttaaagcctgacgtaattgagcaacatcggtagcaattcccgcgttgacattttgtattacaggaatggtaggtagctcaatggcagtttgttccaaagcttctgcaaatttttctgctgccggcttcatcaatgaacaatgtgatggaacagaaaccggtaaagcaattgctttagcagattgttcttttgccaatgccataacttgctgtacagatgcagtactaccagcaatcacaacttgaccttgtgaattatagtttgctgcttcaactgaaccttggcctaatgcagatacgctctggcacaattcaactactttatcatcagctaaaccaagaatagcagccatagcgccttccccttgaggaacagcattttgcatgagttttccacgcaaattaactaacttaactgcatccgccaaactcattgaacctgctgcaactaaagcgctgtattcacctaaagagtgacctgcaaggtatttaggagctaaaccacctaaatctaaccataaacgccataaagcaatactggcagttaataagacaggctgggtattttctgtttggtctaaaccttcaccactttgtgcaatgtgccaaagatcaaatcctagcgcgtctgaagcttcggcaaaagtttgcccaactccactaaactgttctgcgagttcagcgagcataccaactttttgtgaaccttgacctggaaacacaaatgcagtttttgtggctaaagctacttgttcaagacgtttagcagacataagaaatcctttttgggttttcactcatttctctggagaggaaatttaacatttaatttgtatatttataattgcgaaaaacaacaaaaaaagggagctttcgctcccattttttctatacttaagcatcacgcttaatgcatatcatgcaattattcagcatcagctgctttagcgaataattggcgaccacggtagaaaccgtctttagtcacgtggtgacgacgatgagtttcaccagttgcttggtctactgttaatgcattctcggttaaagcgtcatgtgaacggcgcatgtcacggcgagagcgacttttacggttttgctgaacggccatgatggctccttacaaagatcgaaaaaatggatcagaacaaattcagttgtcttatcccataatcataacacaaattatgagttaagtttacccttcaaacctgccaaaacatcaaacggattatcccgtttctcttcgacaacgttctgaatggtaggttgatgtttatgttcacaagcatcatgcttgggagataaaggcatcaacaataacagttcatcttctagtaatgcgagtaagttgatcgaggcaggtgtatcaaaatcaccttttgtcgaagactcactttcacctaaaacgatgaaatcagcatcctcatccaagcgctctatcagtgactcatcatctacaagtgcaatatgaaagtcagaaacaattggcatttcaacaggttccaaacaacgttggcactccattggaacttttgtttccatgtgaccatctaaccacacaatgcgatgataggcatccattgatagcttacagtctatgttgatcaattggttatcaattgacccaacagcttcacgagcaatacgagcaaagcgagacaatggcagttgacctgaccatgtaaagccttgttcagcccatttaaacggctcaatctgtgccggaaaggtatttgctgacataattaaggcggcaattctacaaattcatcggtactctgtcaaagattaagatacaattttgtacttctttagacagaactcggggtaaattaagcaatgcacctgttgcagccgcaacctgaagttaacacttcattactcgtttgcacccattcaacccaccagaaccctcttttacctgacgtggtgcaactctcaccatggccaagctcaaaattagagtctgagcaagttgattggcttattttacactttaatcactggttttcccaccataatgtgacattagttcgtggagaatttgaaccagaatatttcccggcgaacgatcatgagccagcgaaaattcaatttgctcatggttttttcaatagtgctcttcacgaaattagccattggacaattgcaggtgcaaaacgtcgcctattacccgatttaggttattggtatgcgccagatggcagaactaaagaacagcaagatttatttgaacaagtagaaatcaaacctcaagccattgaatggttatttgcacagtcttttggcagaaaattcagagtctcgctagataaccttacgggcgatggtggagatggcagaaagtttaaagataatgtttatgcccaagttcaacgttacttttctggtgaagcaaagttgcctgccgatgcagcaagattcattgaatgtatttgccaatgtacgcgagcaggtgcagcattacaattaaatgaatttaaacgtgaactccttgattaaatgacaaaaaaactacgtaagttacttgcttcataagtttgaaaggtctaatactatttttaataatggcgtgatggagtctctaaaatatgctgcatttacatgtacatcctgaaaatccacagcaacgcctcattgaacaagcggttgagcgtattcgtgccggagatgttgtggtctaccctaccgatgctgcctatgcaatcggatgccagattggtaataaaaatgcgatggaacggattgcccagattcgtggtttaggtcctaaacatcaatatgcaattatgtgttgcgatttatcagatatcgcgacttatgccaaagttgataatgcgacgtaccgtttactaaaggcaaatacaccagccatcaccactttcattttaccggcaaccagtgaagttccacgtaggttaatgcaccctaaaaagaaaacgattggtctacgtattccaagtaatccaatttgtcaggctttattaaaagagctcggtgaacctttactcaccagtacattaattttaccggggcaagaagatccactagatgatccttacgatattgaaaatcaattagctaagcgtattgatgtctttattgatggcggttttggtactttaacaaccacgagtattgttgatttatcaggtgagcatcctgaaattattcgtcgtggtgtcggtgatgtaagtgcttttgaataagcacttacttttcattttttaccaatagtttaaaaaaaagcattatcaagaaaaaaaatactctttatttagtttggattttttttacactttagtcgttaagcaatttattaaaagtcacaattcctttagaatgcttctcactatctgctgttcttctgctacagctcttattgacttgaaaaacaagtctcatgcttttgaaaattcgcgtggcttataatcgtaatgaaccaatcacttcatcaatccatggaagacgttccacacatccgtgttttagatgagtggcacgatacgattcctgaggatctttatattcctccagctgcctttgagattttgctcgaacagtttgaaggaccactcgactttttaatttatctgattcaaaaaaacggttttgatctcatccagcttgatattgctcctattgcaactcaatatttggcttatatggatagtatgaaatccttaaacattgagctgactgccgactatatggtcatggctgctttattggctgatttgaaatctcgcttacttttacctaagcctactgtagtaagcatcgaaaaagatcctaaacaggatcttattgatcgactcgaaacttatttacgcattaaacaagccgctgaacgtttaggccaaatgccagttcttgaccgtgatacattcagtgccaatgtaagcttaggtcatattgcacctgtttatgaaggttatgatgtttcagcattacacgatgctttgttctgtgtatttaaccgtccggaacctgtaacacacacaattgcgcaagagcctgtactgttagaagaacgtattgcttatattgaagagaaattagagtcaggcgacgtgttaagttttaaagaattacttaatccccaacaaggccgtatgggaatggttgtaacttttatggctgttttagaattgacccgacaacaaaagattaagattattgctacaggagttgaagctccactagctattcaagggtcttcaatatgagcagttttgaacaaaataataatgatttgtcattagccgatattcatcatgaagttttattacagcttgaagccattatttttgctagtgaagcgcctgtctcaattgcccgtttaaaagaagcatttaataatcaatataacaaacaacagcttcgtcagcttttacaacagcttgcccttttacaacatggccgttccattgagttgattgaaactgcgcagggctttcgttttcaggtaagatccaaatatcgcaatatcattgcgcagatttggccagagcgaccaacaaaactgtcaccatcattactagaaacgttggctgtcattgcgtatcatcaaccggtcacacgtgctgatattgaacaaattcgtggtgtatctaataatagtcagattctcagaacgctatttgactggaactggattaaagaagccggttttagagatttacccggaagacctgcgttgctaattacaacgcctcaatttctgaatgcttttggtctagcctctctaggccaattgcctcccctgcagaacgccaaggaagcatttatggctctcgatgcaaatgcaccgaagtcataaagaggtggactgttgatcattatgtctaaggttgtgctgtcatgagtgaaaaattgcaaaaagtattagcgcgaatcggattaggttctcgccgatatatggaagaggttattgccgcaggacgcgtgagtgtgaacggccgcattgcccaagttggcgagcgcattgaaccaggcgatgaattacgcattgatggccgtaaagttcagttccagatcgaagatgaaattcgtcgtcgtgtactgatttattataaaccagaaggtgaaatctgttcacgtaatgaccctgaaaagcgtccaaccgtatttgatcatttaccacaaattgcaaatgaccgttgggtaatggtaggccgtctagatattaacagtacaggtttattactttttacaaacgatggcgagcttgctaaccgcttaatgcatccatctaatgaaattgaacgtgaatacgctgtacgtgtaatgggtgaagtaacaccacaattacgtcaaaacatggtcaatggtgtagagcttgaagatggccctgccaaattcgaatctttctctgaaattggtggtgaaggtattaaccgctggtatcaagttgtagtgaaagaaggccgtaaccgtgaagtacgccgtatttttgaatcacaaggccttaaagtaagccgcttattgcgtactcgctacggtactgtcattttaccacgcgaattacgtactggtcgctggatggaactcgacaaaactgacatagacaacttggcaaaatctgttgagttaaaaccacgtcaaggtacaggcttatttggcatggcaaaacgtcgcaccgaacgtatgacagaaaagccaatggcagcacgccgtggtggttacttacgtcagcaacgtcgtgatgatgaaaaagaagcgccagctaacacaggcaatcagcgcaaatcgactggttttaaccgtggatttaaaaagttctaagtaaagtttttaaatcaaaaaccgctctaaattgagcggtttttttatggcctacttttttaattaattcatttttgctagttcaatccattcagcttcagggaaatgaatcgctatataatccttcaaataatttgaagtatcttgagagattaatggatcttttgattcatcttttaggttgtaaaccaaagcttttagtttcagaccacgtgacttaagcgcctcgagactaagcaatgtatggttaatactccccaaacgaccagacgtcaccaaaataacaggaaactgatgctgagcaacgtaatcaatagtaagtaaactggtggttaagggtaccattaagccacctgcaccttctaacaatacaatttcaaaacgctcagccaatgtttgagtcgcattctcaattttttgaaaatcgatctctcggttatcaagacgcgttgctaaatgaggtgaagcaggataactaaagatttccggcatagtcagcttgtcatgatcttcctgaaaccaaccttgccccataatttcacgatgcttctggatatcctctgagatatcagcattacctgtctgaatgagtttttgggtaatcacttttttaccctgctcagtccataattttgctaaaaaacctgttgcgtaggttttaccaatttcggtatcaatcccactcacaaaatagatctggccactcatttacttcattctccgggcaatacaataaatcgggtgatatgttaaggagtacccctcagcgtgcttaaaccggtcataatcttgataaaactgctgtaaagtttgcttagtccaacgatgctgagcagttgccgttacacctgttgcttttaaatgctgcaacacggctttaggcgcatcgaaataaagctgagtttctgactgtgccaaatgcaaaatctcaaaaccagcctgagttaaggcactgttccaattttcaagattccaataatttaaaccttgtccggttagctctttaatttcaattaggtttctaggaccaaatgttgaaaagcatagccagccttgctcatttaaagcagcatagcaatgttgaagtagccgtggtaaatcttgcatccattgcaaagctgaaccggaaacaatcatattgagctgctgagggaattctaaggtttcaacgtctccaattaaccatttcacatgttcttcatgattaaagtgctgttgcacctctgcatacaaatcatttaaaactaaatcttcaatttgaaaagattcaacaagcagacgagttaaattgccagaaccgcaaccaatttcaaagacacgtgacatcgcgcttggacaaaattgcttgagtaagttcgttaagttttggcaaatttgtttttggacaattgcatgctttgaatagctttgccctgctttagcaaaacgttgggcaaccaaatctttattcaaactcacaggaaactcaccaatgcttcaagttcatgttgctcaaccattgatgttaaggaaatgcgcaaacgcgaactatttttaggtactgttggtggacgtacaggcatggcataaaaaccgctttcctgaacctgtttcgccttatcgatagtagcctgactctctcccacaatcactggaataatatggctggtcgatggactcacataccccttttgcaccactgcttgttgaagatattggctaatattttttaaatgttcacgttgagattgagccattaatacttttttaaaaataaaatttgcccatgccataacaatcggaggttgtgcggtactaaaaataagcggacgcattttattaatgagataatctttaataattggatggcaaataatataaccaccgactgcggctagcgctttacccaaggtaccaactagaaaatcaatttcctgaattacattatattgttcggcacaccctaaaccttgctgtccacgtacgccaattgaatgcgcttcatcgacatataacatggttttagcaaagcgttttttaagctggactaaagcggttaaatctgtttcatcgccatccatactaaaaatactttccgtgaccacaataattcgttcaatctggtcatcatcatgatacttttgtagaagttgctctaaatgctgaaaatcattatgtcgatagcgcacatactgggcaccagacaaacgaatcccatcaatcatactggcatgaactaacttatctgccagaattaaagttttactatcagcaacagcgggcaaaataccaatattcatatggtagccactattgaataatagagccgcccgaccaccaaatgcttggcttaggctattttccaactgttcatattcatcaaaattgcccgttaataaacgtgaagatgaagaactaaaatagctgcgttctaatggatagtaatctaaaaattcttggcgaagatcaatatcagccgccaacccaagatagtcatttgaagctaagttgagcatcgttttattttgaatcgtaataaaacggccatgctgcacattttgggtaaattgtctgaaattaccttgtcgttttaactcatctaactctgtagcaaaatgatcgagcaatgacatcttaatgtgccccctgcatcgttttaactacttcaaccaactgttcgagcaagtcacttaactcttgttgagtgatgacataaggcggcatgacataaactaattttccaaaaggacgaatccagattccacgctctacaaattgttgctgtaaagttttcatatcgacattaaaggtgagttctaccacaccaattgcaccgagcactcttacatcggcaacataatcaagctgatttaaagacattaaatattgactaagctgttgctcaattcgcttaatattggcctgccaatcttgctcaattaataattgcgtactttttaaagcaacagcacaagcgagtggattggccataaaagttgggccgtgcataaataccccagcctcaccgcgactaatggtttctgctacatgctttgtcgttaaggtcgcagataaagtcatataaccgcctgttaaccctttacctaggcacataatatctggctcaacttgagcatgttcccaagcaaagagcttacctgtacgaccaaaaccagtggcaatttcatcaaaaattaataacagatgatatttttcacaaagcgctttagcctgacgtaaatattcaggatgataaaagcgcatgccccctgcaccttggacaatcggctcaataatcagtgcagcaaggttttcatgattttgctgaatagcttgctctagctcggcaatatcttcttggttccactcttcatgaaatttggtttgcggagctgctacaaaaagacggttcggtaaacttgtaccaaaaatctgatgcatgcctgtcactggatcacaaacagacatcgcattccatgtatcaccgtgataaccagaacgtgtagtaataaaatttgttttttgtggctggccttgtgctgtccagaattgcacagccattttcaaagcaacttcaacggcaaccgaacctgaatctgcataaaaaattttatcgagactcggtggtgtaatttttaaaagaattttgccaagttcaatagcaggatcatgagttaaaccgccaaacatgatatgagacatattttgtagctggtcagtcactgcctgattaagctcagggtggttatagccatgaattgcacaccaccaagatgacataccatcaattaaagttctaccatcatcaagttcaatcgttgccccataggcacgcttcactttaaatgtaggtaaaggttgggtcattgaagtatatggatgccaaatatgttccaaatcaaaattatcggtcatcctctatacccttttacagcaattaaatctttcatttagcacatgttaaacctgttaagaatgaaagaaaattgcgagatcaatcaaagcttatgaactttgctgatgaattgttaaaaattggcagatttcttcaattgttctttccacctgtaagtagggaaaagcatgtgtagcgtcttttagcaacttataagtcatgttttctgtagcgaaatccttaaaattctctataattttgcaaggaatgacattgtcttgctcagcaaacagatgaagctgtagacccagatagtttttcaagttatctaccaagtttagctgctcaagcatttgcaaccccgctaataaaagttcatttgacggcgggtttgctatattttgtacactcatccaatcttgtttcgcttgagatgagccaagtgtaattaaataataaaaacgctttaaagtggcttgcgggttctgtaaaaaagacgctttaaattgactaaaaacatcagtaggcattgctgtttgccaattatcggtagcaacaaaacaaggattcgacgcgagcgtaattaacgttttagtttggcccgtttgtttataaaaaaagtcaaccagatatgttgctaactgtccacctaaagaccaacctacaaccacatcaatatcagttaaaaaatcaagctgctcgtgaaagtcacaacctaaaacattaaaaatattaataagttgcgtgtcatacccagctttcgttaaacctaattttaacgagtgcaaaggttctactcctactccccaacctgtaatcaataaaattttattttgtaacttcatatgcacgctcaaagacaaatttatggaaattatatattaatatcaatttaaaatatcttttaaaatcaatataaaaatcgaattcaaaaaagtaaaatcaactatttagggctgttaaatattctgaaatatattgataaataaggcctaaaatatttatatgaaatatacaaaaatttaattatctaaacattgaagcaaatcaaaaaacaacataatccacacttcacccataaatccattatgcaatgtaattaatgttaatacttatgtttttttattaaaaaaaatgactcatcaattcattttaatgttagaagattaaatattgatcaaaaaatatgggcaggcaaatatgaacaatcaaagtataatatcagatgggagagaaaaatatacatattttgttacacccaatgatattataaataccttacctacagataaaaattattgtttatttctggatattgatggaacattagctccatttcaaattcatcctgagcatagttttattccaaataccaccttagaagttataaaaaaaattattgaattaaatataccggtgattgctgtaacaggacgtgatgttgaaacagcaagtaagctacttcagtctattgaattacctatagcgggcttacatggtttagatatttattttgattctgatacttatattcgcccagatttaagcgatattaattttcaaaaattaaaagaagatattataaattcttgtgaaaaatatcctgatttattaattgaggataaagaacattctattgctttacattatcgaaaaaacccggaattagaagataatgcaatttatattatgcaacagattaaatatttttatcctcaattaaaattaaatagaggaaaatttgtcgttgaattattacctaaacaggcagataaaggtaaagcaatacaaacaatattaaatcatcttaatttaccgttaacccatcccatatttataggagatgatttaacggatgaaacaggtttcatttttattaaccaacagtttggcacttcaattaaagtaggttctggtaaaacagaagctcaatatagattaaaagatattaatagtgtttctaattttctttttttcttcctagaaaaaataaaaaagttatacgtcaaaaatagtcaagatcagaatggagaacaaatatgtctaaattaatcgtgttatcgaatcgaattagtatgccatcgggtaaggcttcagcaggtggccttgcagtagctgtacaagacgcattaaatgatagtaacggcatttggttaggctggaatggtcagcaaattaccgatactgaagcgcctgaattcgatcaggcatattctcatgggatcgactatattacctgccctcttacacatcagcaatatgcacagtactactgtggttttgccaataaagtattatggcctgccatgcatgatcgggatgacctgatcgaatataatgcagaagaatataatacctaccaaaaggtcaatcgtttatttgctgaaaaattacaacagattgctcagcctgatgatctgatttgggtgcatgactatcactttttcagcgtagctcgtcattgccgtgaattaggtatgcaaaataaaatcggtttctttttgcatattcctttcgcaagcttaaatatctggcgcaagatcccagttgcactacagttggtccaagatctttgccaatatgatgtgattggtttacaaactcaaaccgatcagaacacctgtatgcaaacttgtatgggcttacttgaagctcaaaaaatactaagcgacagaatcagttataagaaacgtcaaatcttgattaagtcctatcctatcggtgttcagccagagcttattcagcgccaagcacaacaggcctttcatacaccatacgtatttaactttgaagatataccacgtcaaaaaacaattattggggttgaccggattgattattcaaaaggtttacttgaacgtttcaatgcatttgcaactttccttgaaactaatcctgaatatcatggattggtacgtcaccttcaagttgcaacgccttcacgtacagatattccagcctatcaacgcttataccaacgctttaaggccaaattagaactgattaatgaagagtttgctcatgaagattggcgacctatcgactgttgcttcgacacagttcaacatgacagcttgatgcatatttatcgtcgttctgacatttgctggattagctcattacgtgatggtatgaatttggtcgcaaaagaatatattgcggctcaagatccagagaacccaggtgtgctgattttatctaaatatgccggtgctgctgaacaaatgactcaagcattgattgttgatccattagatagagcagccatgatggattctttaaaaaccgctctagagatgtctaaagctgaacgtattaatcgttatgaacagttaatagaaggtttagcagctactgacctgagtgattggcgaaataatttcttgaaggatttagaaaattctccgacattcacaaagtccaagttgtccttacaagaaaagtatcaacccacttaccatgtcttataataatttaagcttatggaacatcgaggatgttttactcgatgttccgcggctggtaagcaagcttagattactttgccttcacaagagtaaagcgattaagtatagcaatcatggttaataaaaccgccactcctgataagacagtggttaggctagtccactggccaatcaaaccaattaaggctgggccacttaatgaacctgtataagcaatcgttgacactaaagacagtgccgctgctttaggcatatcattttggcgtccaacacgagagaacatgactggtacaatattagaacagcctaaacctaaaagtgcataacccaatacgacaacttgccaaacaggtgccatcacaatagtgaccatagcaagagcagcgacaattgcactataagtcacaatagttttctcaccccactgttttaacaagatatgccctgcaaaacgaccacttgtcatactaagcgcgaagaaagtataagccagcccagcaaaggcaggattaagctggtatttactagttaaataaataccaccccaatccattgccgcaccttctgacaaaaaggcaataaaacacatcatcccaatcaaaaggatcgtaccgttcggacgtgaagattttttaggcgcgtcagttatttccgctgcaccttgttcatcttgctcaaatgttgttaaggcagatggaatggcaacaaagctcaccaccaataaaaccatgactacagacaatgtgctcatgagtggtgaaaggccaattgctaatagtgcagtgacaagcatggcaccgattaaaccgccaaggctacacataccatgaaaactagacatgagcgcacgtaagctgtgcttttccaccacaactgcttgtaaattaatagcaacgccaagactacctgctgccgtaccaaaaatgaataacgctacagccatcgatacaagactatgccagatcgttaaacttggtagtaataccatcaagagtatggtcgccatagcaattaatggacgacatccccaacgcttaactaaagccccagtcgcaggcatagcaatcattgagccgattcccatacaaagcagcaataaaccaaaatttgcgtgatttaggtttaaacgttgctgagcatacggaataagtggtgcccatgcagatatcgcaaagcccaagctaaaaaagctaagacgagttgctaatcgttgtgtacttaagagagtagctgtatctaaaacagcaggtttggaaaataacatatacgcgaagctcaccataaaaccattggcgatccataccaaccgattccccatagaaaaacccttgcctcattaaatttctaggcaagggtttttgttggcgaaattatatccaattccacagaaaaaacatggggtctgatacaaattttctgacttttttgtaactgccaaagccttatgtagtaaggctttgaatatattcaatttggcagaattaacatttaaacggtgacttcattttattaaaatgagccaataaaaaacccagcctaggctgggtttttcaagtcattaaatttgagactggatataattttgcaggccaatcagttcaattaaacgcaactgtttttcaagccagtaagtatggtcttcttcagtatctgataattgttgacgtaacatgtcacgactgatgtagtcgcctttttcttcacaaagtttaatacctgtcgctaatttttcacgcacatgatattcaagtgctaaatcagcttttaagcaagatacaacgtctgtaccaacattgatatcttcacgatgcatgtttggtttggcacctaaaaataatacacgacgaataatcgcatcggcgtgagacgcttcttcttgcatctcatggtcaatacgttcataaatcttgtttaagccccaatcttcatacatacgagaatggattaaatattgatcacgggcagccaactctccgccaatgagcatatttaaatagtctatgacttctggattgccacgcataataaatctcctatcgtatgagtctattatgggcaaacttaaaaatgattgcaaaacaaaaaatagttaagtttatgatttttatcaaattaaaatgagaaacatacgcatttgcagtttaagttatttaaatttcctttgcaaaaagaaacgcttgtccgatttatatgctcagacaagcgttcaaatatagcaaaaaccatcaatttataaatttgtaactaaaatcaatggttcttatttcgctaaccttttagctcaaagtttgcccatagcctgccatgagtgataagaaatctgtttcattcatgacgggaatacctaacttcgcagctttttctaattttgaacccgccttctcaccagcaactacacattttgttttgctagaaacactcccacttactcgtgcacctaatgcttgtagcatttgagtggcctgatcacgggtcatttgttctaatgtacctgtaagtacccagctttcaccatttaaaggttgacgcgttggtgctgttggtgcatcccaatgaattcctgcggcaattaaacgatcgagtacttcaatgttatgcggtgccaagaaaaagtcagcaatccactctgctgtaatatcccctacatctggggttttctttaaagcttctacattcgcagctttaagtgcctctagcgtctgaaatgtatttgctaacattctagccgttgtttcacctactccacgaatacctaatgcataaataaaacgtgctagagttgttttcttacttgcttcaatcgcatctattaggttctgtactgacttttctcccattttttcgatgcccaagagagtttctctgtgctcatgcaaatggtaaatatcagcaacatctttaagtaaatcgagacgtaataaagattctacccaacgatctcccaagccctcgatatccatcgctttacgcgatacaaagtgacgaatggcttcaatacgctgtgcggcacaatataaaccgcctgaacaacgtgcgagagcctcaccttcaggcatcactacaggcgaagcacatactgggcaggactctggtaaatgaacaacttctgcttcagcaggacggaactccggccaaactttttctactttaggaatcacgtcacccgtacgatatacacttaccgtatcgccaatgcgtacatccagacgatgaatttccccaatattatgcaacgttacgttagaaacagtcacaccacccacaaaaacagggtttaagcgtgctacaggggtcaaagtccctgtacgccctacttgccagtcaatctgctcaactgtagttaatgcagcttgtgccgggaatttataagcagttgcccagcgtggttcacgacttaagaaaccaagctgctgttgttgttttaggtcatcaaccttcaccaccatgccatcaatttcaacttgcaagtttggacgttcttgctgaatttgctcatagcgctgctgtacttcttgaattgaattacacaagtactgacgctcagcaatttggaacccaagttccgttaaccattgtaagctatcatgcatggttgtcaggccatgattcggttcacactgtgcaatcccatacgcataaaatgccaaaggtcgagcagcagcaatatttggatcaagttgtcttaaacttcctgcggctgcatttcgagggttagcgaaggttttttctccctttgcttcttggtcagcattgagtttttcaaaaccagactttggcatcaatacttcaccacgtacttcaagtagacgaggtatttcatatttttctgaatgcagaactttaggtaagttacgaatagttttaacgttttgagtaatgtcttcccccgtttcgccatccccacgggttacaccgcgaacaagtacaccattttcataccatagtgaaatcgcaaggccgtcgagttttaactcaacttcatattgtactttctggttcggaagtcgctcttctacacggcgtgcaaatgcaaataagtcttcttggttaaatacattaccaagtgaaagcatggggaccacatgcgtcacactctcaaattttgaaagcgcttgaccacctacttttgttgttggtgagtcggcttgtacaagttccggatattgttcttctaaagcttttaactgatgaaataaatgatcatattcactgtccgagattgtcggctgatccatgacatagtaggcatggttatgctttgcaatcagttgaataagctgacgcatctgttcgatcacggaagttattgccattattttattcaccataaaaaagggtggaaatttctccaccctgagctgcgactagatatattacaattatcgcaacctataccaaaaatttaaactaggctgttgcctgtgctggacgataatcaatcacatgatggcgccaatgttcttttaactgtggcgtaaattcaaggttattttcatcataaaccttaccatcaatttcacgagcaataaggcctgcaatactggtcatcatgtcaaaaccggtaacagctttgctgtttggaagtgcaaggaaaaatgctaagccttgaacttgttcagtcgataaagtttctaaatcgaaaccagcaggaccattatcagtcatacgcaatacagagaacatcaatgcactcggctcatcggtattttcatagcggtggaaacaagacatttcaccgtaacgtagaccatattttaaaagcactttcagtgctttatcacccgataacgcacggcgcggatttggatatacatttaatgcgataatctgctcagccattgctaacgcactttcgtcatcaaaacgctgctgctcatgtaaatgtacatcaagaatgttgctttcaccttcaaactcagcaatttcagcagtttcgatatttggatttaagcttaattccggctcagttttcggttgcccttctgcaacttttggttctgatgagctaacaacttctggttcagcagaaacggtatcaactaactcaactgaactattttcacttacagttgggctaacagtattttcttcagctttaacttcttctacttctactggcgtattttcaacgggtacttgtgtctggactgtttgagcttgtgaagcctgttctagttcttttgttcccttttcttctgactgtgctggctcgcttaaagttggttccactcgttcagcaacggctgctgacgcaacagtaacttctggctgttcaagttgatctcgtacatgacgagggataaccggttgattactttcaggattaatatgcaaatcactgtctagcgagggttcagcatggttcggcttttttaaaatcattcttaagccaattagcatgataataatggcaacaacgatgccaataatcgtattgatttccattctatgactccgaaactaacccgtattcttttgcctgttctaaattgacagtgactaattttgatgtacccggttcaggcatggttacacccaacaagtcagttgccatggtcatcgccagcttattatgtgtaatgtaaatgaattgtacatgttcagaaagctcttttaccaaattacaatatctctgtacattcgcatcgtcgagtggagcgtccacttcatcgagtacacaaaacggtgccggatttaacctgaaaatagcaaatactaatgctaacgctgttaacgctttttctccaccggaaagtaatgccagagaactgtttttcttacccggtggtctcgccatgagcttaaccccagattgccaatcatcctcaagacttaaactggcttcaccaccattaaaaacttttggaaatagattttgtaactcttgattaatctgatcaaaagtcgacataaacaacttacgggtttcttggtcaatgctcttcatcgcatcttttaactgagttaccgtattttccaagtcttgaatttggtggctcaactcatcaaaacgctgagaaacttcttcaaactcttgtgaagcagctaagttaactgcaccgattttttcaaactgtttctgtactttttctagtttttgctggtgttcagttaaatctattttcaaacccgtttgaagctcggcatttaactctttgagctgttcttgatagtgctcacgatccgacttggcggcttgccatgctaaacgtttggcttcaagctgctctctaagcttttcatcttgctgttggtattgatggcgttggtctgtaagcgtttgttgcttctcttggacactattaagctcaatctgccattcattccatgtcttttgcagcttttcggtttgagcaaattgttgttgaaactctgactcaaggtttggcaactctaactgaatagggtcaacaaactttttcgcctgttccatttgcgctgtaatttgttgatattggctctgcaagaacgaaatatctttttcaagcagctcaatttgttgagttgtctgcgtactattacgtcgtaaaatctcacgttcttgttgttgctgttgtaagacttgttgctgttcctcaagctgctctgttaattcttctacctgaaattgcaaagttttatagtcaggtaaaatagtttcgagcttcattgccaatgcatgcaaatcaatttcaagatcatctttttgcatcgcatcttcttcaagctgcgtatctaattgagcgagttgatctttcaattgctgtttttgcaataaaaatgcttgtgctgcggtttgttgcttggcaatttgtacatcaagctgttgcaagtctttttgtttttgtttaatgacttgttgtttttgctgtaggtcaacttgtaactgtcctagctcatctttttgctgaactataatttgatctaatgcttgtaattctggttgctgcttttgaagaacttgttcaatttcgtctagacgaatacgatgactgagcataccttgcgcactttgactttcgtcatcatacataagagcaattacccaatcttgcccgacatgataaccatctaaagtcaaaatagactggccatattgcagttgtttttgttcatttaaagcatgagataaatcttgtgcaatcgctacattcgagaatattgatagctgtggcgatgcaatccaatcattcaagcaaatcaggttccccttaaatttgcttgattgctctgaaggctttaactggcgagcaactccttcctgaaaggcttgttcagtttcaacaatatgtgcctgcaaccattttgctaaaaacttttcaataatttgtgcgtgtggtttgccctgctctgttaactctagagcctgcattaaacgtagcgtatcttggttttgctttggactttgtttagcaacaagctggcttaagtttttctgctctgataataaaacctgtatttctgtttttaacgtttgctgctggtttttatttacctgatgcgcttgttgagcttgttcaatacgctgcacatactgctcaatttcagcttctagcgttgagatttcacgacaaagctgctgctgtaattgctcaagctcgccttgttcatcttcgtgtacttgcgattggatctggtttgcttgatgttgcagcgtttctttttgctgttcaatgcgctgaacatttttgcctaattgctcgatttgagcagacatttgcattttttgctgctgttgtttttcaacctgagcttttacttgctcaaattgttgctgcgcttgccgttgctgtgattgtaaacctgcaaaactttgctctgcttcagctgctgtatgctcaattgcagttaaagcttcggtttgctcttctaactggctattcagtgtttcgagttgcaattcagaaagctgtaaacgttctttagtttgggctttttgctgttctaactgaacgagagttgtactattttgctgaaataaactttgtttttgctctagagtcattttcagttcagacagtttcttttcagcttgttgccattcttgttgtaacggtgaagattgctgaataagtctctgaaataaagcactggtagattctaaatcatgttcaatcgtacttaattctgaacgaactaatttaaatgtttcccccagttcgttcatttgaacggtatattcttcttgtaggcgtacacttttctctgcctgaaaagacaaaatttcaatttttagggtacgaatctggctttctaatgttttatattgaaccgctgcttctgactggcgtttaagcgttttaagttgtgattttaactcaagcgcaatatcttccaagcgtgaaaggttttgctccgtatgttcaaggtgctgcaaggtttcgcggcgacgcgcctgataacgggaaacacctgccgcctcttcaatgaaaatacgcatttcttctggcttggcatcaaccaagcggttaatcatgccttgttcaatgactgcgtaagagcgtggccctaaccctgtgcccaagaaaatgtcagtaatatcacggcggcgacaacgtgtaccatttaagaaatactcagatttaccttcgcgggtcacctgacgacgaactgcgagctcattataagcattataagctccacctaatttgccataggtattgtcaaaacgcagttctacactggcaacaccaactggcttacgcttggatgttccggtaaaaataacatcttgcatgctaccaccacgcagctgacgagcgtttgactcccccatcacccagcggatcgcatcaataacattggatttgccacaaccatttggaccaaccactgctgtgcggttcgccttaaaatttaaagttgtactatctgcaaaagatttaaagccggaaagttttaaactgcttaaacgcataatgccctaactagcggcgtgagcgtctcgcccaagccaattcaatctgtttcattcgtgtcagcgattccaacacaaggttacgtaagtgtcgacaaaaatcttccataaataaagcggcttgttgtgattttcggatcaaaattgcatcagtcacgagtttaaataatgcaaatgcttcttgtagttcccgtttagaggtatttagcgtcaaaaaataactacgacgtaatgatggtaataattctttataaaatttcattaaataaggattaccgaccatatcttgctgttcagcaagatattggaaaatagcatcgtagaatttttcaatatcgcctgcttttacatgctcaagaagctgttctaacaagagttgtaattgatcggcttcatgagcacgccatgtttcgcttatgcgttgtacaatatgccccaataacatcatatttgtatcaaacaacgctttgacctgttgtgccgacatttccgaaacaattgcaccacgacgcggaaaaatttcaatgagatgcgtacgctcgagtaataatagcgcctcacgaactgatcccctacttacgtcaagttctttagcgatacgaagctcttgtatgcgttcgccttcaaccaattcgccactaataatctgttcgctaatgtatttgacaatttgctcagaaagactttctgtctcttcgagattcataaatcacccgctactttttatatgcattaatccatgcttttctttcgcatccttgtttttaactgatcccatccattaaaaactatgtcattgtctgacaattttattgcattttaagccaacccacccaaaatccatacagaaatcggatgaaaaactcacctttaatcttttcaagtcttcaaataaaaaagcttaaaccgtgagagtctaagctttcttttctatatatttttaataaaacgtttttaattcataaaacctttataaataaagtaactgccgaccacgactaacaagcaagcaaagcatttttttagcatttgtggtgacaatgcgtgggcaaccttagccccaagtttagcagtgacaaaactcatgacactaataccaataaaagcgtagatatggatatatccaatcgtattaggtacagaaatgtgctctttagcaccaaaccacataaaaccaattgcacctgcaatagcaataggtaaaccacaagcagcagaggtcgcaactgctttttgcatgactacgccatgacggtttaaatatgggacagttaagcttccgcctccaataccaaaaattgcagaggcaataccaatgcctccacctgccataaattgcataggggttgaaggaagctgacgtgttgggtcaaccacaacatgggctcctttgaacatccgataagccatcacaacagcaaagacaccaataagaagctgtaaatgctgtccagacaaaaggtcggcaatacctgcacctaaaaaggaaccaatcactagtcccggtgctaaattacgaaaaacaggccagaggactgcaccttttttatgatgagccgaaactgaactaaaggaagtcacaataatggttgctagggaggttccgactgcaatatgcatgattacagcgggatcatagtgcaactgggtaaaaacgacatagaggattggtacaataattagtccaccaccaactccaaacagtccggcagtaaaaccagcaattgcgccaatgagtaaatatatgattaactccataaatgttttaccactctgctcatattcaacatggatttagagactcgccaactacaacaacttttaagcgcaaaaaaccagcttccagaagtggttttattaaaagcaaccacaacttcgaccaatgatgatattcgtgaaattgcccaaaaaggcattacaacaggcttggtttgcagtgctcaacaaactcaagggcgaggtcaacatcaacggcaatggatttcacctgaaggaaacatttatttaagcacattggtgcaaactcgaacacccttagatggtcgcttagcacttgaagttgcgttaaatattttgcaaattccacagctacaacctttgagcctacaagtgaaatggccaaatgatttgtatagtacacaaggaaaatggggcggaattttggttgaacctctttcccaatatcaggcgattgtgggtgtaggtattaatttaaaaacaccaccagtcactgatagtgatcaaccgatcacgtctctagaagatttaggcctagagcaaatgagtcgtcttgagttaatttcagagctttatgttgcaattcaaaatgcagcccgctggtttgaacatggttgttataaccttgcaggacgttttaaccaccatgctgcatggcttaatcagttagttcagttcgaacatagtcaaggactggtatatggccgtttcgttggaatctctaatgaaggtgcagtgattcttgaaactcctgaaccacagcagttttatcaaggtcgtctaagaccacaaaccactcagtaatcaggtatttttcccatgaaaagtttatggcttgatatcggaaacacccgtttaaaatactggattactgaaaatcagcaaattattgaacatgcagctgagttacatttgcagtctcctgccgatttattactgggattaatccaacactttaaacatcaaggcttgcatcgtattgggatttcttcggttctcgataccgaaaataatcagcgtattcagcaaattctaaaatggctagaaattcctgttgtttttgccaaagtgcatgctgaatatgcaggtttacaatgtggttatgaagttccaagtcagctcgggattgaccgctggctacaggtacttgctgttgctgaggaaaaagaaaactattgcattattggttgtggaacagcgcttaccattgatttaacgaaaggtaagcaacatttaggcggttatattctgccaaacctttatttacaacgtgatgcactgattcaaaataccaaaggtattaaaattcctgattcggcttttgataatctaaatccgggtaataacaccgtagatgcagtacatcatggtattttgttaggcctgattagtacaattgaaagcatcatgcagcaatctcctaaaaagctgctgctgactggtggtgatgcaaaactatttgccaagtttttacaaaaatatgatcctgttgtagaaaccgatcttttgctcaaaggattacagcaatatattgctcattatcctaaagactaaaatacagaacaaaataaaaggcgctatatgcgccttttattttatggatttatttcttttggtcattattaccaaacagtggtcccataccgccgccaccgccaaattgtttttgcatattgcctaatgaacgcatcattttgctcataccagatggattcgcaaacttcttcatcattttagccatttgtgcttgttgcttaatgagtttattcacttcagctacatccataccacacccagctgcaatacgttttttacggcttgggttcatcaggtctggattacggcgttccttgatggtcattgactggataatagcttccattttcttgacctgcttttcaggattcgcctgctcaattgcttgctgaattcctgcactgctcatgcctggcaacttgtctaagaagcccatcatgccgcccatcttcttcatttgctcaaattgcatcagcatatcttcaaagttgaagctgccacctttttgcaattttttcgccattttctcggctttttctttgtcgattttacgttcaacttcttcgactaaagaaagtacgtcacccatacctaaaatacgttgagcaacacggtccggatggaatggttctaaagcatcaagcttttcgcccatacctaagaacttaattggcttaccggtaatagcacgcacagaaagtgccgcaccaccacgcgcatcaccatcagttttagtaagaatcacacctgtaagcgctaaagcatcgttaaatgctttagcagtatttgcagcatcctgacctgtcatggcatcaaccacaaacaaggtttcagtcggcttaactgctgcatgcaattctttaatttcgtccatcatgtcttcatcgacatgcaaacgacccgctgtatcgacaatcaacacatcagcaaactggatttttgcctgttcaattgcacggttaacaatatcaattggtttttcagaaggatctgatggaataaagcctgcaccaacttctgctgacacagtttctaactgtttaatcgctgccggacgataaacgtcggcagaaacggtcattacttttttcttttgacgttcttttaagaaacgtgccagcttggctgctgtagttgttttacctgcaccttgtaaaccagcaagtaataccacaactggaggcttagcacttaaatccagtgtttcattggcctcacccatcatcttggtgagttcatcatagacaatttttacaaatgcctggcctggagataactgagtcatcacttcttggcccaatgcctcttccttaactttcgcgataaattcacgagttacaggtaacgcgacatcggcttcaagaagagccatacgtacttcacgtaaggtatctttaatattgtcttcggtcagctgccctgagccagtaacatttcttaaactctgcgtgagtcgttctgttaaggtatcaaacattgcaaaatccgcttaaaatggctagttgcaaaaaaatctttctcgaaatagaaaatttatgcatagaatgctataggatactttagttcgcagcgaatttatatcttatctagatgaattaatcctgaaaaaggtttgacatgattagcctccccttggtttacacaattttggcactcatcgcatataccacttctttctggtatctgttcatacgtttaatgtcaaaacgtgaaccaaacccatggttatttgcttttgttacgaccttagcactgctgttacatggcacagttttatgtcatgccatgctgacgccatcaggaattaactacgatgtttttaatctggtgtcttttacatcaggacttatgttgttgttaagcttagtttttagtactttccgcccgattgtaccgttaaacttgctcggcattcctgtagcggcgattggtcttattttaggttttgcatttagccgtcccgatcagtttattgaacagcattcattaggtttagatactcatattattctttcactttctgcttatgctgttttactgatggcaaccatacatgcgatcttgatatggttccaaaaccgtgaactcaaaaagaaacaaaaaaacgtatttgggtcaatttacttccatccattcaggccatggagtctttattatttgacctcatcattactggttttattttattaactattgctctcgcgtttggtttcttaacagttgatagcttctttgcccagcatctcgctcataaaaccgtatttagtattatttcatggtttatttatggctctttattgattggccactataaacttggctggcgcggacaaaaagcgattcgttttaccttaattggttttgcattattagcgatcggttttattggcagtaaatttgtgcttgagatgatattgggccgataaaacaattaaaatttcagcactactagacagcgttatacatatcccgtataacgctgtttttgttttgctcaggtgactcagactgtgaaactcatactcgctccaatggaaggtttaactgacccgatcatgcgggatacactcacatctgttggtcacttcgactggtgtgtaaccgagtttattcgcgttacagacagtattttgccagaccatatttactatagtttttgtcctgaacttaaaaacgatggtaaaacagctgctggaacacctgtacacgttcagttcttaggcaataatccagagatgcttgcagcaaatgcggcaaaagtcgttgagctgggtgctcctgcaattgaccttaattttggttgtcctgcaaaaaccgtcaatcgacatcgaggtggttcggtacttcttgatgaaccagacgtagtacatatgctcattaaagcagtccgtgatgctgtacctgcgcacatccctgtttcagcaaaaatgcgtttaggttatctagatgaaaaccacaccatggaaaacgcccatgctgttgaagatgcgggtgcaagctggttaacagtacatgctcgaactaaagcagatggttatacgccaccagcttattgggaaaaaattctaccgattaaagaagctttaaaaattaatgtgattgctaacggcgaaatctggaccaatgctgatgctagagcttgccagcaacaatctggctgtgaagatttaatgattggccgtggtgcagtgactactccagatttaacacaatgtattcgccaaaatatggatgaagcactgtttacttgggaacaactggttgacttacaaatacgttttttaaatggtcaagcaaaaacagaaattgggatggttggccgttataagcagtggttaggtatgatgaccaaagcctatcctcaagcgaaagaattatgggaccaagtgaaacgcattaaagctttagatgaaattgttcagcagctagagcaaaccagttcttctcgtatttaatcactcaaacaaaagagagcgattgtttaaacaaccgccctcttttggtatttcaggttaagtaattattaattattttttaaaagccacttactttcattttaaagtcggtcaccgaagcacccgtaactccaaaactccccatagacccattgggtaaattattaaatgttgttgtactttgtgtacctaaatttcctaaagtcacattgttaagtgatgcatcaaatttactagatacacctatatttccaaaggtaagtcctgtcgggtcaaccccagcataaaatccatcaagaacaaaacccgttgacgcattcgtacctgcaaatttaaacccaaatgtagcacccgtgttatctgaaactaaagtaatcgggcagccagatgcagcagaacaaatcgattgaatagctcctccgaatttaaccataaccgactgagcagcatgtcccagttgaatatttaaacggggcttattggtttgtacaaagttaatatcaagattaccagtagaacgaatcagctcttttaccccggtattcaccgttgtgcccgaactaaaaattgattttggtgcataacttgttaatgcataatcggatgggctagacaaagatgtacttggtgctaaataaactgaaaatggtaaaagccgaataccatttacgtcactccccatcgtgacagctaaatttaaaaatggatttccaccaccagcatcggtatcgattgcaatattaaaagaaggatttgtagatacagcagctttaataaactctatgccaggaaccggattagtagagtttcctgcaatgacaagacctgctttactgttgtaagacgtagatgcaataccgttcgtatcaatcaaggcgacttgattaaatttaacttgatcggcctgaatacctaaagttagaccattttgacccgtcgcagctgcaagactttgatcatctaaaggctgcatcgcaaaaacacttgaactactggcaaataataaccagcagactatatttttatttttcatgtcgctctaatccttaagagacaaacgtttattatttgttcagactatcagaataatattcaagtacaaagcaattatctctataacccgacgaatgcaaatccaatcacactaaactaaaatttatataaaaaagtgacgttaaacgtcacttttattgattagttaaaggcgccatttctaggcacaatgctaaagctgctatttagacgtccacccgtaattgcaagctcacctaaacgtgctcctgcacctgttgaaggtggatagaaattaatatctttcacacgtaatgcgccgtcaatactcttatcaggattaaaataaaccgcggtatttacaccaactttacctaaaccacttgcggtatctttgcccacaactaaagcggtattaaacgctagctttccagtaatattgtcaaaaccaattgcagaaccatcaatcgggtcgctaatttgtacagtattaccagttgctgtcgcaggcattgtaaaatcacctagtacagttaaagcactaccatctgcaattgaactattcggcactatcgataaattaagatcgccgcctaaacgtagttttaaaccaaataagacatcattatttttggcaaagttatcgattggcgaagtacaagacccggttgccggacaagttttatatttagctcctggtaaataacctgctgcaatttcggttgataaagcaagtaacatatcttttaaaccgatatttaaactgccattttctaaaccaatagtgccattgcctttgaggaacatatcaatattacgtaaccccatataataatcggtagggttgcccgcattattagcatttggagaaccatcaattaataaaattgaagttgttttagtaccgcctgcatctcgacctgtcgttcctacagctataccaaaacctaaacgtgaagttgtaccagatgttgcaactaaattttgaatcggtttaccgttggcatcttttgtatagtaataagcaccatttgcaggcgcatctacaccatagacagcggcattcgcatttaaattataaaaaggtaatgccaaaccccactggttatttaaaccattatctgcaaattgattggcagcagcgacatttgcactggtagtaaaacgacctcgtcttgagaatgcctggaactctgctccacgcatggcaagaattaggctaaatggatttgtaaccgtatcacggtggatattatgttgataatcggcagcagttgttaaagtgcctgatcctaaacgaattgcatttagtgttgcgttatttggcattaataaggtttttgtatcagcaagatttagataaatatttccgctgtcaaaataaccgcgtgtagccgagttcagccccgttaaattaccgaattcaaaaccataagcattcagacctgcaccaccaatttccaaggtagttgctttaccatctgaacctaacatcgaatcattatctttagtgaactcccctttcatacgaaaggcaattccagagttacctaaaatactattacttgatcccgtacctgaagctgtattagcagtacctaatgttgttttatctgaagagccatccataccacggacttgtaagtaactattgaccatacggccgctagcacctaaacgaatcaagcctttagaattctgtgggctatttgtcgtgtctagggcataaggatttgacttatcaacatttgagctaagcattacctcaatattcagacctgaattggttactttcccactactgtctacatatgtaccagcagttaaaccagaagcagaatcggcgacacgattaaaatcgacatagccataggtactatttggagtttgcccaaccgcagcagtattattccctgtattagtttgtaagactatgccacgggtaggatcaataaacatgacgcctttaccaacaaaattaaagttaaaattctttaatatcaattgatttagctgactacgcgcgtctaattgccctaaataaatatttgcattatttagaccaagcgtcatgcttgactgactattcgggctaaataaaccatcttgagtagtaagagccaagtttaaaggcgaagttgtttgtatagccaactgtcctaaagtaggtgaacaagcagccgaactattacagactttgacgctatttacagtaatgagcgagggactactttgaatagaaaaatcgacccctgctttacctgtagtcgcattacttcctacgtctaaacggtagtttgtacctaaagcttgtgtagaggcattacttttttgtatttttacaccactcgcttgagctcttaaaatttgatcagcacttgttggtgtgcctgcatggtcgtcccaataagcattatcaatattgatttcgttgaaagtcgtttgtatcgagattccatcttgaccattgaccgcactcaaatcggcatctgttaacgcttctaaagcaaaaacctgtccgctcactaacaacatactggctgttaatgtatttaaaataaactttgagccgtgactttctttatttttgttcatcacttcagttcctttgaaatctacattaacctttaacaacgtggatggctaccatcacagctaaagaccatgacttttccttgaattgctaagttgccattcatcattaagcccataaatcctgtttcacgaccgtagtcatacgccgatggggttgcagtagccacttgctggttcgcactattagcagtcgctgcataagttggctttttgaaatatgcataatcatacatatttgcactcgagccttgcgttgttgttgagctcgtaaagttatcttgctcaattgacagagcattaaaaccaaaattacgaattaaaattggctgtgctgcactaaaactcagttgaatagccggttttataatttcagtattacttttatcaagatactttaaatcagcaccatctaaacccattttttgaatatttaaagtgccttgcacacctttaaatactaaccaaagtttattaccgctgtcgctattttcagtccaaccacttggcttagtcgcgtctgtttgcacaaagcgtttattaattgctaaaccaatatgacagaactctacgttttcacaaacgccgccactgccattatcaaatatgccgttactggtctggtttaaattaagcatcaaagataaatcagcaccagcttggccattaattgcctgtaatgcatcattatccaaggtttgcaattctgcatgagtcacagttgcacaaagagcaaagagtaaagcagttatttttttcatcgcgttactcctcttatagaccttttgtggtgagctttaaatgttgaattaaaacaccatcaataacagctgaccccatgttattactaattgaagagctaatttgtgctcctgataatttatatgtgtttatatctgcatttggtgtagtcgtataccaacgtccattattgtaaagtgcatcaggtaaaggtgtaccatttggtacaacaaattgagccccattccctgcatctgtggtggtgtaccctgtcgtgttggttgtcggattataataagcagtactatcaatattcgcccagtttgctccttgagaatcaaatcttaagcctgagccagcatttcctgtccagcctgttgccgtacggtattgccaatcataacaagtaaaaattaaactacatgtatagctgtttacacgacgttcttgattttgtaattgatagaagtttctagtttgtgttgtagcagtaacagttcctgtcggtaatttcccaaaagaaatacctacagcatcttgagcattattccctttaaatgcctctagagtattagtcgttgcattataaacagtagaaccaatcgagatactactatgtgttgcgttagaaccttgataggttttaccacctaaggttacattggcaccacattggtaaacattacaggtggagccgaggtaactactatctgttccagtatagtcagtataaattttcttatagatttctggtttattcggaatacgcgctagttccaaactaaagtttttaccatctgaactcaaaactaaaggttgatataaagaccctaatacaagattaatattagggttataaagatataaaccttcgtttgcatcaaaggttggtgcaagccccccattaatagcgggagtaattaaattcccctgtccagtaccagattcacgagtacttaaacgtaatacattattcatagcgctatcagttggtgcagtccatgaacctgttgaagtaatagtagtcgtttgactacgaatacgatataaccaatctgaactaggggaattattgctaggcgctccagtatattgagtactataacgatttacccatggtcctactgtagatgttggggtatttgcagtaattgttgctcttaaattagttgcatcgccactatttaaacgtacaacacccgcaaaacctaaagtattgttataaaatggactcaaaccatttgcggatgttgcaccacccaaagtttggaagagctgtagacggctaccatttaaactaaaattattccaaataccttgcagacgtaaacgattcgcgcggcttgcatcagtactcgtgccgatcaaaccattagagtcaccatagttaaattgatctgttgcaccatttattttatttggattacgaacaaaaatatctgaccataaacctaatttaagtttataggcatcaagtccagcagtatctcttgtccctacttcatataaaggcgcttctaaagctaaataggttacttggcaagttggatcagctgctccactacaatttgttgcactgaaattaggcacagagttttctgtcgcaactttaaaaatccacggattaatagctgtaccccaactcgaaattgcagctgctgtatcggtagaagcaagacgggtatttgtatcgttatctgatttagaaagagctaagccataaagaaaaatatcagctttacctactgcacggtccccagagtcgatcgtaccgtttttattcgtatctgcagcagtcatacttaaaggcccaacaggcacataattaatataacctgtatctttagtacgatccgttaaaatttgattggtggtttcgttcgctccagctccgcgcaataccatgtaagtattttgaggtaaaatagcaataccttcaccagtagtttcactcaaaccagcatcagagagttcttcaagagcgaaactcgattggcttatacaaagcccaattaaagttgccaaaacggttttttgaaaccttaccgtataattaagtgtagtcatcttgaccttcctgttttatacgatgccgtgcaccatatttatttttctttaacaatccttgatgctaggtgaagccatccttttcaccttagaccagaagacaaatccagctagatattgccaacctttccacatttctattatgcggaatatttgcacaaatgcaaaaaaaagcatgtaaaaatttacttttccgatgaatgtaaaatagtaatagcaaccttctcagcatttaacaaaaagttaaacctgagccatggcagtttggtttaaagttttgattggttaactgtaaattacttaaatttaaagtaagaggactattttttaaatcaactgtactaatattcacatccaagtcacccagttttaacaaaccacccaaatcagaagtttgcgcagggttagcttgtaaatatgcagaaacagcagctgaaatttgtggaaatagtggtgaaatatcaatcgcatcttgaggaataatattaccaatattaaccgggtctgcaaaagacatccaccaacccttttgagctacgtcatctgcttttgcaccaggccactgtaacatttgattttgtagagctaaatacattggcgagttaatcggtaaattatgaatgagacctaatgactgagttaaatttaaatttgcagtaatatttgaaattgtcccgttcatatatacattagaaaatttcgagcctttacctgctacagcacaagctaacacagaacaatctgttaccgttgcttcaaccttacctccttgagtataaatacctgtcggttcaggataagctggatcatgtggtcctgctgcattatattgtaccgtaccatctactgggtacgagctactgtgacctacataaatattaggaactttaactggtgcagataaaacctttgagctaacccggttaccattaacttgaataggagcaatttcgaagtagttattttgaatacctggaatattaaagcctccatttgaagtaataaaactaacctctgcaaatcctcccaagcctaaagcttgtaaacgtcccgttacagcatttgcgccatataaattatctcgcgtagcagaagttgttgcataacctttaatcaaaccactactatcggactgaaccttcatataacccgaaatagagttgatcccattcggggtggttgtattttcagtacctgctgttaatagtccaataaatttttcagcacttagtcttaaaccaactacttcacgtgttgatgctgagtttggattcttaacagcaaactcaatgaatggattggttaaaacagccgaagatgaggcacgatcttcattagacataggtagcggattaccattggcatcaaaattctgtccacttaaacttaaattatcaatatcaatatcacagccacccgcaccatttacaccaccacaacccaactgtagtttacgaatattagtattgatttctaactcggcttccattcctaatttataaaaaccaatattactgctattgtcacgtagtttttctaaatttgcagagtcagtaggtgcgatataagacatactcattaatgcctgaccacgagtagctgacaactcagcatcagacattggaactaatgtagaaccagcataagctgaagaaaagcataaacttccgagtgctaatatcgcaacctgaagagacgtaaactgtcgcatgaccgacctccgtatccttgggggcataatctaatttctttttatttggcttctttttctttaatgtactcttaaactaaatacataagaaaaataccgatatttacgatttcgcttctttttaatttgtgtgatccacatcaaagaaaaaaatcaattcttgatcattttatatcattttctacaaaagaaaacgtaccttattaatattccgataaacgtcactttttaaggtatatataaaaaataggccacttaaagtgacccatttttaaagctcatctatttttaacaacttatgtcttaggaagtgtaaccccagtttggccttggtatttaccaccacgatctttataagaggtctcgcatacttcatcactttcgaagaatagcatttgtgctaccccttcacccgcataaatacgcgcaggcaagttcgtggtatttgaaaattctaaagtaacgtgtccttcccattctggctctaaaggagtgacatttacaataataccgcaacgtgcataagttgatttaccaaggcacacagtcaaaacattacgtggaatacggaaatattcaattgtacgcgctagagcaaatgagttaggcggaataatacaaacgtcagactcaatatcgataaaacttttttcatcgaaattttttggatcaacaattgcagaatgtacgttagtgaaaactttaaattcgcgggcacagcgtacgtcataaccatagctagagaccccgtaggaaatcaatttttcgccattcttatcaaaacggacttgattctctgcataaggttcaatcatgccgtgtttttcgctcatctcgcgaatccaacgatcagacttaatagccatgtattttctatccaaaaggtaatttcattgattgcgacgtactttaacgtaaaaaagcaattatgaaaacaatggcggctactcttatcgctaagaatagcccggaataaatttttaaagatttaataaagcagaatagctaattggaattgagaaactaactaaaaccaacgaagctgttctttgtaaatttgattgatttaaccaacgtactttatttgcagccaagactgaccctaaaaaaatccagaataaggcaatcggggtaattaaagctaaataagccagcatatgaatgagataaatatgaaaattagtccacgctgcaacagggaaaatcgctgaagcaaaaagtaatgccttaggatttagtaaagttgcacaaaataattcacgtgggcgaatagttggctgatctaattcaagctgttgatttgccgtgtgccataatttaattgctaaaaaaataatataacaagcactgagcaatttaagtagaggaggtaataaaggaagcgttgcagaaactttcccgattaacattccccaagctgaaatcgaaatcacataccctagaacttctgccggaattaatttagcagattttttgaggcctacttgtactcctgatgatgcaagtaaagtatttgttgggccaggggtaagtaaaatagtggcaaccaagccaataaaaagccatgaaatcattgaatgacctcacaatgtagtcatctcagattaatagatattattctagaaggcaaaatctaattgtaagacaattttttaacatcttaagaaataaaatttaaaaattatttataaacaataatttattaaaattttattaattctaagctaaaaaactattgagtcagtcacagcgttttacgtaccaaattgtatttaagtaatataagtatttttattttaaatctatttttacattaaaaaggcctataataaattattaccgcagtaagtttaatttttaagcttttaataagtttcaattaatatattgtttctttgtgtttatatgagctcctaagctctactatcctatgattatggcaaaacaattttttcaatcttggcttccttctccagagaaagttacaaatatgaaatttttaaggattttcgggcaaaaaacccttaatcctgtgctttggtatgtcaaccgtaaatctattactcgcgccatttttgtagggacttttttcggtttactgcctataccctttcatagtgtatttattgttatggcagttttactgtttgaagttaatttacctattagtttaatgcttgcttggctcagcaatcctcttacattagcacctattttatatattggtttctggtttggtgcccatatttatcatgtgcatatgataaataagaaaatgcttttaggggtgcttcatcagatttcacgttggattacgcattttggtcatggtcatatcgatttgagcctcgctaaaattttaatatcaggtctcattgtcgaagcgtttgtatttgcaaccatactatatatagtgactgagattttctggcgttggatggtcattcgaaactggaaaaatagaacaggacataaaaaacaagaagacgctctataagaattcatcttcttgcctaaaattaaattgttattttggtagtttagatttcatatattcttcagctacgttaagcacgtagtcttggcaagcttctcctgtaccagggtcataagctccattattggtaatattattagataaaattcgaattcctaaaaacggaacattaaactggcttgcaatttgtgcaacagaagccgcttccatttcttcaactgaggtaccataacgctcatggaaaaattgaattcggtcaagttcattattccacacatctgccgagccaatcgttccttcaaccacttcacctttatcataacgtactttatgtgccgccattaatagctcttggtcaccttcaaatttacgaattgcaataggttcagggtcagattcatctgttggtaagacatcaaaagcctcaacccatgtaagtgagtttgaacctccacctaatggctgtttaggcgttctaaaagcgccaatattggttgcatattttcctaaaacgatatcgtaaacatggagatcaggatcgtgcccccctgctgttccctggttaataatggcaatcggtttataccgttcaattgccaaagcagttgcggcagcagagttactcatccccatacgtgttttagaaataatcattggatagccattgtaggttcctttccaaaaggtccagccacctattttttcaacagttttattttctaactttgaagccattctttccgactctacgggtaaagcaccctgaataataatcggctgtaatttctgtttttgttcctgaactgttggtgtttgtgaaactgatgagttgtcatcattacatccaactaaaaataaagcgctacataaactgattacgcccaaactatacttaaattgcattttccacctgtttctttgaaaaagaagcgtaaagtagcaatctgcatgccaatttcaagtttagctttgttatttagattcagtaatttaaatttttcttttaaccagccaataaaaaacccgacttaaagtcgggtcagatgaatcaaaagattcgtttgtcatctcgtgcacgctgagggatttttttaatctgttgccacactgctttcgcaatatcgatataactatcagctgcatcatccattgcaacaacactcggtttaccttgatcagcatgctcacgtatttgagcatttaaaggcaaacgacctagcaatggaatatgatattgctcggaaagcttatcaccaccaccgataccaaaaatttgctcttcatgaccacagtttgaacaaatgtgggtcgacatgttctcaacgacacctaataccggaataccaactttattaaacaactcgattcctttagtcgcatcaagcaaagcaacattttgtggggtcgtcacaatgattgagccagtcactggaatacgctgtgcaagcgtcagctgaatatcgcctgtacccggtggcatatcaatcatgagtacatctaaatctggccaaagcgtttgattaaataattgcattagagcgcctgtagctttcggcccacgccatgcaacaggtgtgttgttatcgccagttagatgtccaatagaaagtacagccataccgtaagcatctaacggtacaaaattttcactttcaataagaggagttttaccagcattacctagcatggtcgggatacttggcccatagatatcagcatctaataccccaaccttaagtcccattttttgtaaggcaagcgccaaattgaccgttgttgtcgatttaccaacaccacctttacctgatgaaactaaaataacattcttgattcgaggatgaagtggcacatctctttgttgcggcgctgctttctgaattggtgggttatttggatccggttcagacttaggtgaagcatcaagcacaggaggtaggtttgaattttctttcggtgctttagatgaacaactttgacccgaactctcttgtgtagggcgcttttgttgaactacatgtaaattaagttcttcaataccgcacttttgcaaagcaccagctaaatcatcatgaatttgctgcaagtattctttttcgtctgggaaagtattaatggtgagttgtaaaacacgaccttgcacttgaagctgactaatgcgctcttttaaagcatcttttgaatctggcaataaataattttggagtacggtttggatttcctcttctttcacttcttgtgcgggtgaaaaaacggattttaatgaagaaagccaagacatattgtttactccaaaaacagatcattacagcttaatggagatagtgtaacagtattgctccgcactcgctcaccttgggatgaataattactaacttcagaactcatcttttaggtaaggagtacggattttagtttaaatcagcttattcagcagaatcatgatttttcaatttattaagtttttcggtagctgttttcttcaactcatcaaattttgcagttgcttgagtttttaactcatcaaattttgtagccgcctcttcctttaattctgcagctttggctttagcatcatcaagtttatgcgctgcttcagtacgtaaatggtcaaacttatcttgcaggctatgctgagcatcatcaagtttgcctttcaaatcattagctttatcttcaactgcctcttttgcagcagcttgtttttcttttacattttcctttaaatcttccaaggctttttcaccttgtacttttgcatcggccgctttggtctttagctcatctactttatctgcaactgcttctttacccgcagtttgtttctcttttacattttcttttaaatcgtccaaagctttttcaccttgtacttttgcatcagccgcttttgcctttaattcatctaatttattttcagtagtcatcgttgttatcctcatcgttaattaaaaaaattacctgaataagttattagttatacatcgttatggcttattttctgaccgtaactgcaatttgaaacaaagacaatacaggaagattcaaatattttttgatttgtttatctgttctaaagagaaataacttctggctttaagtccatttttatagatacctcttatatttagtcaaagattattaatctttgcttatcttcctgcatcagttaaaatcttccaccttataaatacgaatgagagaatgagatccgtgcgtaaaattttagtcaccaatgccctcccttatgccaatggtccaattcatatgggtcatttactcggttatatccaggcagacatctgggttcgtgccatgcgggcaatgggtcatgacgtgacttatgtatgtgcggatgatgctcacggtacagcaattatgctacgtgccgaagcaaatggtattagcccagaagagcaaatcgcgaatgttcaaaaagaacacattcgtgattttgatggttttggcgtacatttcgatcattatgattcaactcatagtgatgcgaacaaagctcgttcaacagatatctatattaaaaaccgtgaagctggcaatattgcagtccgacctgtaactcaattatttgatccggaaaaaggtatgttcttatctgaccgtttcattaagggtacttgcccaaaatgtaagtcagaagatcaatacggcgactcatgtgaagtatgtggtacaacttataatgcgactgagttactcaatccgcgttcgactttaagtggtgcaacaccagttgaaaaatcatcagatcactatttcttcaagctcccaaactttgctgaatatttgcaaaaatggacccgcgatgaaggtcgcttacctctttcaattgctaacaaattggatgaatggtttgaagcaggtttagcagactgggatatttctcgtgatgctccttattttggttttgaaattccggatgcaccgaataaatatttctatgtgtgggtagatgccccaatcggttatatgtctagttttgaaaactatatcaaaactaagcgcccagatttaaactttgatgatttctggaagaaagatagtcaaaatgaggtttaccactttattggtaaagacattgtttacttccatgctttattctggcctgcgatgcttgaaggggcgaactatcgcactccaacaggcttattcgtaaatggtttcttgactgtaaatggacaaaaaatgtctaagtctcgcggtactttcattaaagccgagacatacttacaacatctaaacccagagtatttacgctattactttgcttctaaactttcagataaagttgaagactctgacttgaaccttgatgactttgttcagaaagtaaattcagatttagtgggtaaagtggttaatattgctagtcgctgtgctaagtttattaacagcagttttaacaatacgctatcaagtacatgtgctgaatctgacttagtacaaagctttattgatgctggtgattcaattgctgctgcatatgaagcgcgtgaattctctacggcgatccgtgaaattatggcgcttgctgaccgcgcaaaccaatatattgatgagaaaaaaccttgggctctggctaaacaagaaggtcaagaacaacaagttcttgatgtatgctctgtcggtatcaacttattccgtcaattagcagtgtacttagctccagtactgccaactttagctcagcaagttcaagatttcttaaaacttgaaagcttcgatttcgagtcacgtaaacaaattcttgtaagccatgagattgcacagttccaacctcttatgcagcgtgttgatccaaaagctgttgcagccatggttgatgcttctaaagagtctttaggtgctcctgctccacaagcaactaaatcagcgaaaaaagagaaatctgccgagaaaaaagcagcccctactccagcagttggtgaagctgaaattattggtattgaagacttcttaaaagttgacttacgtgttgctcaggtcgttgaggcaggtacagttgagggttcagataaattacttcaattgacgttagacgtaggtgaagctgaaccacgtaatgtatttagtggtattcgtagtcaatatgcgccagaagacctaaaaggaaaattggtcgttatggtggctaaccttgcaccacgtaaaatgcgttttggtatttcaaacggtatggtacttgctgccggaaatggtgaaggtattttcattatttcaccagatagcggtgcaaaacctggcgataaagtttcttaatccgcctacatataaaaaaagctccctacattgggagcttttttatttctaacctactttttaaaataagcaggcttatctacactgagtacatttaaagtgctatatgtgagacattctatccatcaattaataattagattgctcatgattattggcttgtaaatcgggaattttgtagtctttttcataaaccggagaaccagcaatactcatcgcccgttcatttgaaggttgctgtttacttgttgttctcatctcacatcctgtagttaagatgaaaaaaacaaccgaaatgctcaccattagttttttcataacgtgatcctcatttctttttgttttattaattaagttaccactttttaaatatttaagtgctaaaaaagatatttcaatttgtatatattttgcgcaaaaataaagccagactacaaagagttggctttatattttttagatattttaattaaagatttatcatttgaagaagattaactttaagcccaatacgctaacaatgcttccagccactcggtcaacacccgtttttgcttttaaatacatttttcgaggcttctctgaagataaaagcattgctacacatgagtaccaacctgcatcaatcataaaacaaatgagcggtaatgcgacgtagtaataatttggaatttcttttggcagtaaagcagtaaaaacactcgctagtacaacagcaattttcggattacttaactgagtaatcaaaccatatcggtaggcttgtttataagtcattttcgatttggcatcattttccatggcaattggttctttggcatgtttaataattttaaaagcaagccaaagcaaatacagcccaccaccaatttttaaaattagataagctgaaggcactgccaataaaactgcctgtaaccccataactgctaaaaagccaaaaagagctgcacccgtgcccgtccctaatgccgtaaacaagccatgtttacgtgatttagatattgaattttgcgccacataaataaagcttggcccaggacttattgctccaagcatcaatgccatcgcaattgaaaaaagaggaataagggactcaaacattgtattgacctaacatcatgcaattgcgcgatattctagcagctttttatgacacatataaaaatggaaaagagataaattataaaaattgaattttcatgtttttacaatttagctattcacaacggacaaaaatgtccgttaaatatatcatctttaaattttccaaatcagtgacatgagtaaacgtcaaaaaattgcagcccataatcgggatgaattactcaatgcagccgaggaatgctttcgtattcatggtattaatgtccctctacaagtcgtgattgaccatgcaggtgtaggtagagcgacgttctaccgcaacttttgtgaccgaaaggctttaattagcgcccttttagagcgtgcgattacacagctagagcaaaaagctgctcattttcaacaattcgaagatggtttatttcgtttaattgaaggacatattgcacaacttcccaagctcgcaattttacaagatttttggagagtgattgatcgacaagatccaattatgctaaaaatttatgaacggcgaaataatgcacttaagccactgattgaaaatgcaatagaacaaaaactgtgccgagctgatctaactgctgatgactatgcaatggtcacagcaatgttgggttcttcatttcaaggacatgaacctgaagaacagacccgcttagcgaaacgagcaattgaattactatttcatggtattcaagtacaaaaaattcgagggatagaatgagtaaaacgcctcgttatttagaaacgccacctgactggacaccagaagaacaaccgactttacctggttcgccagcagcgattgcgcattctgtacctaagcgatttctttatttttttattggtctgtttgtcgctatttcagcaagcttaagtaatggtttcattacggcaaatttgcccttaatccaaggtgagtatggcctgacaccttctgaagccgcttggcttcctgctgcttatgtaatggccaatgtcagttcgaatctgattttgtttaaagctaggcaacaatatggtctgagagtcttttcagaaataggacttgttatttttattgccgtgctggttttgcacatttttgtgcatacctatgaaatggccttgttcgctcgggttgtagcaggtttagctggcgcaccacttagctctttaggtatgtattacaccatgcaagcttttaaaaaagccgacatggcaaaaggtatatatattgcctttggttttcagcagttaggtgtaccgctcgcctggattatttccccttttcttgtgagtacagacagttggtctgttctttacacctttgaactcggcttagcactttgttgtttagcaatggtggtttctttgaaattaccacgtagcttacgaatctatgttttcgaaaaacaggatttcttcacctttgctttactggcgccaggttttgcatgtctatgtattgtgctgacacaaggcccaatcttgtggtggtttaacagtgaatggcttgcttatgtattaattgcaggttttagcttagttgttttaggtttgatctatgaacattatcgtgccaatccattaattatgacacgttggttaggcgcctcctcaaccctacgctttatctttggtgcttttgccattcgtcttttaatgtcagaacaaagttatgcagccgttaatttcctaaaaactatgggaatgggtccagaccaatttgttccactctatgtggtcatattggtggggattttaagcggaactctatttagtgcgcttactttctcgcgtgaacgaattatttttcacttactttttgcagagtttttgattctcattgcctgtggactagattatcaccttacgagcgatgtacggccttcaaacttctttgcaagccagtttttagtaggctttgccggcggcctgtttatcggtcctttacttctaattggatttgcgcaaactttggctaaaggtccttcgtatgtagtgacttttattgtcttattctctgcaacccaaacatttggtggccttgttggctcatcttttttctcgacctatcaacaacatcgtacacaaaactatcaagtcgagattattaaagatttggaacaagctgacccactagttgctcaaaggctttctacctatcaacgtagtgcagccatcacaacaaatgaccccgcattacaaacagctcagtctatgcgctcacttaatcaagtggttactcgtgaagctcaggtccgtgcttacaatgatgtgattgcattaaacggtatttttgccgtcgccttactcttatggggcggatttaatattgcacgtagtaaatacctacaacgcagaggaattagccgcccttaacggcttatgttattgatgaaatagaaattgagattgatatatgtcagatgatcaaaataaaccggaacaaacccctgctcaaacatctaataatgagccaacgcctgcacctgcacctgcacctgcacctgcacctgcaagtaaactgattccgacaaaacgctcaaccctattatggatgttgggtgtgcttattatcggtattttagtgattttgtgggcatggagaattgggccttttgccacaagtgtgcagcaaactgacaatagttatgttaaaggtaaaactaccattttatcctcgcaaattaatggctatgttaaagatgtattggtaaaagactttgaccatgttaaaaagggtcaagtattaatgcatattgatgccaccacttatgaccaaaaagtagcacaagcggcttcaggggtagaacaggccaaaaatactttagccaatcaaactcagtcaattgctcaaaaacaagcagatattgtggctgcgcaggctaaagtagaacaagtcagggctcaatatgaactttctttagcacagcttagacgctatcaacagctagggaatagtggagcagcttctaaatctgagcaagataaagccgctgctgatgccgaaaataatcttgcagcccttaaacaggcagaggccaatgttctagttgccaaagaagcacttaaaacagctcaagtcgcagaagcaggcttagaagcacaagtttccagtgctaaagcacagttagaccaagctcaaaccaccaaagactatagtgttattgttgctccaatggatggacaacttggtgaagtaaaccctcgtgttgggcaatatgtggccgcaggatcacagttactctatctgattccacagcaaacttgggtgattgccaactttaaagaaacccaaattgccaatatgcgaattggacaaaaagcgtggtttacagtcgatgcaatgaaacataaaaaatttacaggtcatgttgaacaaatctctccggccgcgggttccgagttcagtgtactaaaaccggataatgcaacaggaaactttaccaaagtcgttcaacggattgccgtgcgtattaccattgacccaaatcaggaaggaatggaacacttacgccctggtatgtcagtgattacttctgtcgacacaagctcttaatcagctttttaaaaacctctttaaaaaagctacaatgtgatcaatcattatttttctcaatttctaatgtttgatcacattgcccaacctatctcctatcagcacgttgaactatccttccctgttcatctcgacattaaacgtttagatttagttcatcctcaaatttcgggtaataagtttttcaaattaaaatacaatttgcttgctgcaaaagaacaaggtttatcaagcattttgacttttggtggggcttactcaaatcatattgctgcaacagcttatgcagctcatctttttggtttaaaaagtataggaattattcgtggtgaagagttagctggtaaatcacttaatcccaccttggcaaaagctcaaagtttaggaatgcagctacattttgtctctcgccatgaatatcgcttacgagatgaagcaaattaccttaaacaattacagcaacaatttccgcagacctatatcattcccgaaggtggttccaatgaactggcagttcaaggttgtcaggaaatcctgagccaatatgacttagagcaatatgatgtgatttgctgtgcagtcggaactggcggaacgatttcaggtctgattgaaagaagtgcagcacatcagaaagtcttaggattttcggctttaaaaggtaatttcttacaacaagagattaggcaatggactaaaaaacaaaattggtctttgacagatgtatactgctggggcggttatgcgaaaacctcacctgaactattcgcatttattgaaaattttgaagagcaatatacggtcccccttgaaccgatttataccggaaaaatgatgtttggtctgtttgatcttataaaaaacaattattttccagcgaatacacgcattttggcaattcattccggtggtttacaagccgatattagaaatagacctcacgcataactcacccgcttttagaaggccttatcccttacctgtataaatgtccttagcatgagtaagtgctggcatgatagtatatgcccctttttaatttttacgactaatcgagaacttcttatgtctaacagtcatgtcgatgtcattgtcttaggtgcaggtgcttctggactcatgttggctgcacatgctgctaaacggggacgttcggtcttaattttagaaaaagccaataaaattggtaaaaagattttaatgtcaggcggtgggaaatgtaactttaccaacctctatgtagaacctgaaaactatatttctcataatccgcactttgttatttctgccctatcacgctatagcaactgggactttattggtctggtctgtgattatggaattgcctatgaagaacgtaaacacgggcaattatttacgctaaacggcgctaaagaaattttagagatgttggtgagtgagtgtaataaaacaaacaatgtcgaaatccagacccattgtgaggttggacaagtcgatccattagaacaaggtggtttttcagtacacaccaatcagggccgttttagctgtgaatcattagtggttgctacaggtggattatccatcccaactttaggtggctctggttttggctatgaattggcacaaaaatttggacatacagttttcccaacccgtgctggtttagtaccatttactttttcagatcatattaaagaagtcactacacgcctaagtggtaatgctttagatgtgactctaactaactcgaagaatagctttactgaagcattattatttacgcatcgtggtttgagtggtccaagttctttacagctttcaaactattggaatacaggtgaaagttttaaaatcgactttttcccgagccaagatttagcaacttatttaaaagataaaaagaaagcccaacctaaagttttactgcgtactcttctgaacgaatttacggcaaaaagtatcgtacaagagttacaacaacttatatggccagagcagagcgagacagcaattggtaatatcagtgatgcacagctagatcatattgccgagcagctacatggttttattgttaaaccatcaggcacagaaggatatcgtactgctgaagttaccttaggtggaattgatacaactgaagtttcatctaaaacactcgaaagcaaaaagcagaaaggactatactttattggagaagtacttgatgtgactggccacttaggaggctataacttccaatgggcttggtcttcggcttatgcagcagcacaatatgtttaaatgatgaataagctaatttgatgcttttgaatcattggatgatttttcagaatcatgcttatggcttgttgtctgttttgatgattcagatttgctaaatacaaatttataagcacttgctaaaaaaccaacggtaatcccagcaattacaacaggtgctaaaaaacgaccaggttttttcatcgtattttcctcacttatttgtttttatagctgtccaagacagaacgaccactcaatatagagtggtcgaacttatcacaaaaatcaaagattttttgtactgtttatctgaaaattagttacacctactaaatttcatcattttcgccagtagaaccaaacggtttatttactggtggttgtgatggatttacttgtgcagaatcagctggttttgcatcagatgaaactgttgttgatggtgcagttgtagtcgttgacggagttgaaaccgtagtcgaactacctgttgtcttattattagtaggcggttgatataaaggatttggttgacttgcctctttcttagctttatccagtaaatcagataaaagtctttctgctggttgacgcccccccaaaccaaatgcaagagcgaaagcaactgcaactgcgcctagcgttaagccgaacgcaaggtttacgatcgaatcggcaatacccatcgctcttaaaccaagtgcaaggactaaaccaataatcaagacacgaaccaaactacctaaccaacgcgaactattatattcaccgcgttgaacaacgttcgccacaacatttgcaagccagaaaccaatcaccaagattacagcgcccaatagaatgtttgcaccgaaatggataaacattgcgattagaccactaatctgatcgaaaccaagacggtcagcagcttcagaaactgcaaacaacatggtaaagaacacgattagccaaccaacggcattagaaactttagtttgacctaaaaagcgttgtacatctaattttgctggaatttcatcaacaccagttcctgcaattaactcagcaaccaagcgaccaacaaaacgtgaaacaatataagcaaccagtaaaattaaaccagcagcaataatgtttggaatagcttgtaaaatttcattgagcattgctgttgctggctgagaaatagtctcaatacctaaagcttcaaatgctacaatcaatgtcgtaataatgatgatggcaaaaacaaatgaacctaagaatttgcctacatttgaatttttgaaaagaccaattttttccgcttgagattgcacacctaagctattaattaatccttcaacaataccgcgtacaatttttgccaagatataaccaacaaaaacgataacgccagcaataaagatatttggtaagaatgctacagcatcatttaccatattttgaaccggaatcagtaagcctgttaatcctaagattgaaagaacaatcggaaggaaaagtaacaatacaagccagtaaagaatttcaccaatattctggctaattccccctacacccacttcgctgcttaacttatcatcaagttgagttcgggataaaacattggtcacccccgcccgcaccagtcgagcaacgatccagccaataaaacccaccactacagcagcaataatatttggtatatagacgagtacctgattaaccatgttgctaaatggaccgctcactccactaatgttgagcacatttaaagcagcaacaacggcgagaatcagaataaaccagaatacgactttggagatcagaccttctatattgggtgtacgtccagtcgctgaagataatttcgcattggtatttactttttgcagaagtttttttacacctgccgccaccaataaagcgatgatccagcctaccagtaagatgacaattgcagctaaaataggatgaaactgatcccagtaatacatcgcatcaaactgagcgccgcgaggcccattaaaaaattcattcatattgttatgtcctcaattgttatgttcttttcagtgttatcactaaatgaaaaacaccagttcgttgtaaaaaatgacgataaatgcggtctatgtcaccttatgttttgaatatttttcaatcaacaaccttctgcataaatacaacaaattgatgcaaaagattgcaaaaaaagccttcaggtcacatcctaaaggctttttatcacgatatactggttagcttattacccttcataggtcttcaaatcagaagtaccactgatgacttgtggtatggtctcatgttgaaaagcggcttcctcttttggcgttttgctgtgatcagcaaccatataaaccacaagtgcgagaagaaaaagcccaacaataattaaaatataaactggcaatcttcttttttttgcagtctcttccggactcgtcacatgaggcggttttgaaaaatcatgcatcttctttcccctcttctattatcattaactttatattcatcataacaatttgatttgttgcattgtgtgaaaaagcattatgagaaggtgtctacggttgcaaaactctacttttaaaaatattaatttagtataaaatttagccgctttaattataacgttttagaatctaacttctcgatattcagaatcttcactaaagtccgatttgtaatacaatatgttttagcccttactttttataaaataggctataataagcccccttgttttaaagctactcaattttatgatgtatcgtcagcaaagcgtaactcttgatctcgacactgacgtcacacatcaatgttatttgcatcagacaagagatgaccatctcattggtattattgaatttaataaaccaagttatgaactcaaatggggtgatcttgaatatttccgtcgccgcaccgaagagttctcggtcatgccatttcctgaatgcattaatgcgatgattgttgatattcgtaatatcaatgtatttctggacaatgaagttccaattttaccgtggcgtttactcgaagaagattgtcctgttcgcctagttgttcctcaagaccgccttgaacactatgcgggattatttgaaccaacatggctttcaacagatgtcgacagtgcgattgcagagatccgtgagtttatggatatgtttgtccattaataaacatatccataaaaaattttcttaaaatattttacttcctgtttttaccagtaattttctaccgcaatatttccttcaccacgacgattcattgtaagaccacggcgttttagagcctctttcgtatcatcaaccatttgtgggtttccacaaagcatgacatgacttgatgctgggctgagttctaagcctgctactttttctagctcaccattttcgattaacacgggtaagcgttcatgtaacggtgcagatggatctcgggtaatgataggaataaatttaaaacctaaatgtccttccccaaaagtttcagcaatctcttgaatacggtcaacataagccagctcagccgcagtacgaacactgtaaaccaagttaattttctggtaattagaccaagtttcaaagtcttgtagcatcgacaaaaatggagccaagcctgtacctgttgccagtaaccacagatcatgcggtaaaggctgttgatagcgtgccaacgtcaggtaaccatatggaattttttccaaataaagctcatcaccgactttcaaatgctgtagattcgaggtgaaggcaccgtctggtactacaattgagaaaaactctagcgtttcatcaaacggagaagacaccaccgaatacgcacggacaaccagctcatctcctacctttaaaccaatacgcgcaaattgccctgccgtaaatttaaaatgcgaaggacgcgtcatggtaaaactgaaaagtgttggggtccaacgatgaacagataaaactttttctacgctaaatttttcaattgacatgatttcaacgtggcatgaaatagtgcgctcatgttagcatgacagccgaaataatgaatacttttaaacgttaaggctttttaaacatgcggatgacattacgccagttggctgtttttgtagcagtcgcccaagaaggaaccgttactaaagccagtgatgcggtcagactgacgcaaagtgcagcaagtatggctttagccgatttagaagacggcttaggtgctcctttatttgatcgtttaggtaagcgcttgcagctaaatgatcttggacgttttctgcttccccaagcattagaaattttaggccgctgtgaagcctttgaacaagcagccaagggtgagttacagagtattgaccttcgtatcggggctactttaaccatcagtgattatctcatgccagatttaatggctaacttcttacaacgtcatccacaagcacatttacaacttcaagttggtaacacacgccaaatgattgaagctgtaaatcagtttcagcttgatttagctttaattgaagggtcttgtcacttacctcaactccaatgtattcactggcgtgacgatgagctagcagtgtgctgctcacctgaccacccgttaacacgtttaaatcgcccacttacccctcaagattttcatgacgtagaatggatattacgtgaagaaggttcaggtactcgtgaagtctttgataatgcaattttgcaagatttaccagatgcaaacattcgtttgacgcttggacataacgaagcgatcttaaaaatagtggctggtggtttaggaatgtcgtgtatttcaaagttagcgattgaacctttaagtgaaaaaggtcaacttgttattttagataccccattttggcaacttacccgccctctttatatgctagtgcaccgccaaaaatatcaaggtccgggccttaaagcatttttaaaattttgcgatgaagatcaggcttaaagcttgatcttcacattcattagcggcggaaattagacaataactcacttgtgatcgctttattgtgatcagcaattttagttttcttagtcttcgcaggattaggatcaatacgctcaatcttaacagctttaaattttcctcgattatctgcagcaagaaatctcactttttcatttcttttcggttcaccttcggatgcaggaaaatcagaaatatgaaagaaaatatctccttcagtcgtcgaaataaaaccaaatcctttatcggcgttatattgttttacccttccagtataaaactcttgcttcatgatttttctccctactttcccaatgcaattactgtagtaaataaaaagagactttcatgtccgctcttaaaagttatacggcttaatgaagtctctttttatcgttatttcaaaaattagtctttttgaacactaccaaaaatcttgtcaccagcatcgcctaaacctggaacaatataaccatgttcatttaagccattgtcaatagatgcagtataaagctgaatatcaggatgtgctgcctctactttcgcgattccttcaggtgctgcaactaacaccataacacggatatctttacatccacttgcctttaatacatcaatagcagcaactaaagaattacctgttgccaacattggatcaatgatcatggcaatacggttagcgacatcaggaactaactttttatagtaagtacgtacttctagagttgcttcatcacgctcaagccctaacacacttacttttgcacttggaattaggttaagcacaccatcaagcataccgatacctgcacgcaaaatcggtacaatcgttatttttttacccgcgatacgctgagtagtaacattgccagcccaaccttcaatctcacaatccacaactggtaagtctttcgtcgcttcatatgtcaataacatagtcacttcctgagcaagctcacggaaattcttggtactgatgtcagcacgacgtaataaacctaatttatgacgaataagtgggtgacgaatttcttgaatggccacagatgttacctaaaaatataaaaacgtatttattataatctttttttaactatcaataaaaaaaagcctccatatttggaggcttttttgtacacaagaattattgttgctgtgaaagcatgaaatgtaatggagataaaatttctgcttttaatgccaaattaatcattggatctggataaacacccaaaataataactaatgcagcagcagccaataccattaaaccacccactttttgtccccaatgtgcatcagcatcaatacgaggagtttcaggtggagtcatatacataacaaccatcacacgtaagtagtaatacaaaccaataccactacccacaataatcattgcagctaagaaccagtgttgagttgttacagcagccataacaaccaagaacttaccaatgaagcctgctgttaatggaataccagccaaagataacatcatgactgttaatgttgctgtaagtactggacggcgccagaacaaaccacggtagtctgcaaggctttgcgcttcatctacgttgttatatgggctagacattaacgctactgcaccaaaagcaccaatagtcgttaatacataagtcaccacatacacagttacgctgcccaagcttgcatatgtcatgctgattaaagcaattaacaaataaccaaagtgagcaatagatgaataacccaaaatacgctttaagttgacctgacgaacagcaagcaagttaccgactaaaattgacaataccgcaatgattgtcaaaacagtcactagcgagttcaccatgattgcgccagaagcaagcaaataacgtacgaacaaaccaattgttgcaactttagcagcagtcgccaagaacgttgccattggagccggtgcacctgcatatacatctggtgtccatttatggaacggtgcaagcgacaatttgaatgcaacagcgaaaataataagtgctaaacctaataacaccattggctgtttgattgcaccaaataaagcttgtacagaatcatagaatgaaagcgaaccagtgtaagcatagatatacgccatccccatcaacaacattgcagaagctgttgcagaaagcacaagatacttaatccctgcttcaagcgactgactacgttgatatgtataagcaagtaagccgtatacaggaatcgacattaactcaaggctaatgaagaatgatgcatagtgtgaacttgcaaccatcaacattgcacctgctacagaagcaagtaacaaaagatagagttcttcgcggttgtctttataagtctcaatatatgcatgagacaaagtacagcaagccaatgatgcaactaaaatcatgaattgatagaacatggtaaatggatcaaccataaacatgcccatcacatttgccggcacaaatttaccgccaaataattctaataagatataaagtgcagcaaggtttaaaccgacaacagaggttgttgcgattaaattatggttacgcttaattgaaattaacagcatgacgacgactgctgtcaaagcaacaatcatcactggtgctaaaggcataagcgtagaaaatgatactgtgaagttcatgattattggatctccacatggtcaagttgagtagctgtttgctgaacagtttcaacgacttcttgtactggtacataactattgaccaaccactgcatgcttgaatgagatacatccaagaatgtttgtggatagataccaagccaaacgagaccaatcgcacaaatcatcaaaatactaacttcacgagcagataagtcttttaatggactagtgtagtgttgcttttgttcagagtttggttcaccaaacaaagcacggtgaatcaagatcaaaccatacaaacctgcaaatacaaggctgatagaagcaatgatcgtgaatacaggatatttattaaatgaacccatcaaaatcaggaattcaccaataaagttacctaaacctggcacaccaacaagagctgcgacgaagaacattaagaagaacggtaaatactggagctgaccacgaagaccacccatcaaacgtaaatcacgtgtatgtaagcgctcgtagatttgaccagacataatgaacaatgcagctgatgacaaaccatgtgccaacatcatgatcattagaccttggaaggtcaaaatattacctgcataaatagcaagtaaaacgaagcccatatgtgaaatcgacgtatacgcaagtaaacgtttcatgtcagtttgctggtaagcacaccacgcgccgtagaaaataccaatcaaaccgaaaataattgcaatatctgcaaactgtgcagaagctgccgggaagaatggaattacaaaacgaagcaaaccgtacgctgctgttttaatcaagatacccgccaagtctacagaacccgctgtaggtgcttgagcatgggcatccggtaaccagccatgcaatgggaaaactggtaacttcactgcaaaaccaataaagaagcagatcatgaaaccatacgcgaagccagcaggtaaacgattcgctacagctaataaatagttgtaatcaaaaccgatcataccagtcatcatgtaaccataaaccacaaggccaaggataccgattaacattactaaaccagcgatttgcgtatataagaagaacttggttgcagcgtaaacacgtgaacgaccgtttgaacccttatgaccccataacgcaatcaagaagtagattggtacaagcatcatctcccagaagaagaagaataggaacaaatcaattgccaagaacacgccgataacgccccctaaactccataacaagtttaagtggaagaaaccaacattcttttggatctcaccccatgaacaaccaacagcaagtacaccaagtaaagctgttaataacaccatgagtaaagacaagccatctactgctaggtgaatgccaataccgagagattgaatccacggtaagtaaaactcagctgtccaagttgggacttttgagcctaactcgtagctataagtaccactttgccaaagtgcaagacctaagcccaacgtgatgagcataccaattaaggcgatccaacgtggcaaagttttgtcgagtttatcgactaaccaacaagtaaaacctgcaatgaacggaacaaggatcagcgcgggtaaaattaaattgttttccattttatttccccactacctgaataacgatcaagatcatcaataacaccactacaccgagtgacatgcttgatgcgtattcacgcaatgaacctgtttgacgtgagctggtgaaactgtttccgcctttaacaagcgcaggaagaacaagccataagctgtcaatcggatcacgaccaaatagtttggcgaagaataaataaggtttaacaaaaacgatgtcatacaacgcatcgaaaccaaatgcagtacgacaaatatgagctaagccagcaccaagacttgtttttgcaaacgattttactgcaccgtaagcaaatgcaaatagaccaataccaacagctaaaccaacaagcgcgatacctactgctaaatgctctgccccatgcatgccttcaacaaattgttcagcaacatggaattcaggaatttttgccgtattcaaaatatttgctaccggagcttttaatgcagcgcccacaaaagtagacaatacggccaagatacctaatggagcccagtaagtagcacctttaatctcatggtaatgtgtattttctttaccgaagaatacaacccagattaaacggaaggtatagattgaagtcaggaatgcacctgctacaccagcccaatataagctgttatataaagcaatcgattgaccttgtacccaaacctcaccaagaatcgcgtctttagagaagaagccgatagttaagaatgggatagctgctaatgcaccgccaccaatcgcaaaacatgcaaataggaatttgtttttgtagaacaaaccacccattttgaaaatattttgttcgtgatggtaagcaagaataactgcaccagaagacaagaataataatgctttgaagaatgcgtgagccaacatgtggaacaagccagcttgatacgcttcagcacctacagccataaacatataaccaagctgactcatagttgagtaagccaaaatacgtttgatgtctgtttgtacgagagcagcaaagcctgcaactaataaagttacagcccctgttaccgaaatgaattgcatcacttcaggcgcaagttcaaatacgctgaatagacgacagcacaagtacacaccagctgttaccattgttgctgcgtggattaatgcagaaacaggtgtaggacctgccatagcatctgctaaccatgtttgcaatggaatttgtgcagatttaccagcagcacccaagaacaacattaatgcagtccagatggtaagtgacgaactcttcgtcattacttctgctgcgtgttcaacgatatactgagtattaagcgtaccaaattgttggtaaagcaagaataaagcgataagtaagaatacgtcacctacacgggtaactgtaaatgctttgatcgctgcccaaccatttgcagggtttgcataatagaaaccaatcagcaagtaagagcatagacctacgccttcccaacctaagaataacaacgctaagttgtcacccaacacaagcaaaagcatgcttgcaacgaacaggttgaagtaagagaagaagcgcgcatacccttcttcaccacgcatgtaccatgatgcaaagatgtggattaggaaaccaacacccgtgatcatgcccatcatgagtaaagataagccatctaaatgtaagctaatgccaggcgcgaaaccaccaacattaaaccacgtccaaagattttgaacaaaaacttgctggccgctactggtaaatgccataccagcaatcaatgcaaataatgcagataaacctacagaacctacaccaataattgctgcaacattttcagagagcttatcacgcccagccgccaataaaataaaaccgattagcggaaataatactgttagatataaataactcatccgcgcatctcactagcagcatccacatccaaatgatggaagcgatgatagaactgaaggacaatcgcaagaccgatacacgcctctgccgcagcaagggttaaaatcagaatgaacatgacttgtccatctggttgtgcccatacgctacccgcaagaacaaatgctaacgctgcagcattcatcatgatctcaaggctcattaacataaatagtaggttgcgtcgcaccattacaccgtaaaaaccgagtgcaaaaagaatggttgcaacaatcaaaccatgttctaaagggatctggcccattattctttttcctcttctgcacctggttcacgtttacctaagtggtatgctgcaacaagggctgctagcaataacatcgcggcaacttcaaccaacaataaatagtgtgtaaagagcgcttgaccaacaacttttggtccaattacttgtgctccaagtggtgcagagatggttgtatattcaccaccaagcatccaaactaaaagtaagccaagtaaaaagctcatgagtgctggatatgcccaagcatccgaagaaagccatttacgctcttgttcaactgtgtgttgccctaagttaagcatcatcacaacgaatacgaacaagaccataatcgcaccagcataaacaatgatttcgagggcgccggcaaacggcgcacctacgatcatgaaaataccagcaacagcaagcaatgaaacaatcagactaagcaatgcatgtacagggttcgtgttagtcactacacgaaccgtagaaacgatggccacgagcgccatcaaataaaacggccacatcatggtaatagactccgtacatcgattggtgcactttctttttgtgcttgacctttctctttaccgttaattgccataccagttacacggtagaagttatagtctgggtatttacctggacctgaaatgagcaagttttctttctcatatacgaggtcttgacgtacgtattcgcccaactcgaaatctggagttagctgaatcgctgtagttggacatgcttcttcacacataccgcagaagatacaacgagagaagttgatacggaaaaattccggataccaacgtccgtcttctttttcagctttttgcagtgaaatacagccaaccggacatgcaaccgcacaaaggttacatgccacacaacgctcttccccgtccgggtcacgtgtcaagataatacgaccacgatagcgaggtggtacaatttcctctgctggtacttctggataaagaattgtgtcacgtttacggaaaccatgggtaaataccatgaataacgtccgaacgattgacccaactccagctagaattttatacattttgtactccctgctgtcttaggcctgattcatcagaatcacagcaccagttaccaataggttaaccaacgccagcggcaaacaaattttccaaccgaagttcatgacttggtcgtaacgtggacgcattaaagaaccacgtgccaatacaaacatcattacgaagaatgctgttttaatcacaaaccagaacactggtggaacaaatggaatttctaaattgaatggagctaaccagccaccaaagaataaagtcacgatcaatgcagagataagtacaacgtttacatattcagcaacgaagaacataccccatttcataccgccatattcaacatggtaaccttcggccaattcttgttctgcttcaggttggtcaaatgggtgacggtgagttaccgcaacacctgcaacaacgaaaatcaagaaacctaagaactgtggaatgatgaaccaaacatcacgttgagcttcaacaatttcacgaaggttaaatgaaccagcgattgcaaccacacccattagcgagatacccaagaacacttcataagaaattgtttgagcagctgaacgcaaaccaccgagtaatgaatatttgttatttgatgaccaaccaccgaataacactgcataaaccgcaataccagccattgccataaagaacaacaaaccgatgctcatgtccgcaacacccaatgcagggcttacaggaataaccatgaacgaaagcaccgcagttgccatcgcaactgccggagctaaacggaaagttaatttatcagcaaattttggtgtccagtcttctttgaacatgatcttaagcatgtcggcaacgatctggaacataccaccaggaccaacacggtttggaccataacggtcttgccaccaagcaagcaaacgacgctcaatgaaagacatcaacgctgcaacaagaacaacaacaagcaaaatcacaactgcttgaacaacagcgtaagcaattggccagttctcagcccaaagtggcgtttgacgtataatttcttgattcatgaattacactcctaatgccactgaaacaggttcagctaaagatactgtcggagctaaaccaactgggtaaccaatataacctgtaggtaaatattcgattacttgtacaggtaagctcacagttgtttcgcctgcttttactgtaatacgttggccttcttgtagattcaaacgtgttgcgtcttgttcgcccacagcaaacacagcttcaggaatacgagtttccattgcaggtgttttaattgtgaattcgccagaaccaaagatatggtgcattggtacaagacggaagctttcaggatttgcaactacagctgttggagcgacatagctacgtgctggacgttttgctaaacggtcgaataaacgaacgcctgaatcaccaccttttaagtgaccacccacttcatcttggtatttgttccaagattgtggagagttccaacctggcgcccacgcaaatggtacaagcgaagaagctttttgcggaccaacataaccttccatagagaatgttaatgctgagtctggatctgtcggttgtttaggttcatgaactgataaaggcgcacgcattgctgtacgaccagaataacgacgtggttcacgagcaattttcaaaccatgtacacggtagccagcgtctggtgcaacatcttgaattgcttcaagtaccggaacgttcttcacgattgtttcgattacgtcgtcaagtactgtccaatcaattggtttgcctttaaggccagtttcaatggcatgcaaccaacgccaagattctttaatcgcgtattcaggtttgtagtagcttggatcgtaaacttggtagaagcgttgtgcacgaccttcttggcttacgacagtaccatcaccttcggcaaagcttgctgctgaaagtacaatatcagcctgtttcacagtttcagtttcactatgatcaagcacgattactgtttcagctttatcaagtgctgctttaacttgagcggccggtaaacgacggaataagtcattttcaacaataacaagtgtgtcgtagtcttgagcaaatgcttgttcaaggcttaagccaccaaataatgccaagcccatagagttcacttcaggaacaacaaggcttaaaccagcttttgagccaaggttttgcgttaactctgctgctgcctccataattgaagcatcttgcaagctcgtacccgcaataattaacggtttgtttgctgcttttaaagtgtcggcaatagtttgagcaaatgcttttgcatcatcatctaaaccattaactgtttcgcctttaactgccgcagcaactgcaaaacctaatcgcgcaatatcatttggagatgcaacaacttcaccagtcgcaacatccgcaaggcgagtttgagttgcagccaagatatagatcggagatttcgcttcctgaccaatacgttgtacaggctcagccaaccagtccggtgtacgtgtttttgcagccatttcgcgagctttgttttttgcagcttgacgaactgacaatgccatacgtggagcagtttgagttaaatcttcacccaaaattaatactgcatcgtagctttcaatttcacgcatattcgggttgtaaatgccctctgtttgcatgattgaagcagcaagttcaacgaggctttgctctttttgtgcaacacctgttgagtagtttgcttgacctactagttcacgcaatgcgtaatttgattctaagcttgcacgtggcgaaccgatacctagaacttttttaccttcaagtttcgcaattgtttggtccaacgcttggtcaacagaaacagtagctactgtttcgccattacggaactgaggttgacgtggacgatctgcacggtttacataacctgtgccaaaacggcctttgtcacaaaggaagtattggttaaccgaaccattgaaacggttttctacacgacggatttcgccataacgctcacccggagagatgttacaacctgaagaacagccatgacacacgcttggtgcatattgcatatcccatttacggttatagcgctctgaatgagtcttatcggtaaatacaccagttggacatacttcagtcaagttaccagagaattcagactctaaagtacctgattctggacgaccaaagtaaacacgtgatgcattggcatatacaccaaagtctgtaccgcctgcataatctttgtagtaacgaacacaacgataacaagcaatacaacggttcatttcatgtgcaatgaatgagcctagttcttggttgtaatgtgtacgcttagtaaaacgatagcgacgacggtcgtgacctgtcattacagtcatatcttgtaaatgacagtgaccaccctcttcacacactggacagtcgtgtgggtggttggtcattaagaactcaacaatagattcacggaaatctaccgcttctttgtcttcaatcgaaatataggtattgtcagatgctggtgtcatacatgacatcacaagacgtccgcgcgtatcttcaggatttgcatactgagttacggcacattgacgacatgaaccaacagaacctaaggatgggtgccaacaaaaatacggaatatcaatgccaagggataaacatgcttgtagcaagttttctgatccattgacttcgtacgattttccatcgacatgaattgtagccatagtcgaatcccttaagcttgttctacgttgctagtttgcacgacaggacgatcagtcactttcgcttcaaactcgctacggaaatgtttgagtgcgcccataagcggctccatcgcacctggtgcgtgagcacagaaagttttaccaatccacaatttacgagtaagttcttgtaagtggtcgatatcttctttcttaccttcacctgtctcaagtgctttaagcgctttaacagcccatggcaaaccatcacggcaaggtgtacaccagccacatgattcacgcgcaaagaattcttccagattacgggtcaacgacaccatacattgggtctcgtctaccaccattaataaacatgttcctaaacgagaacctgctttcataatggtttcagcatccattggtaaatcaatggtatccgccggtaaaaagtcagtagacgcaccgcctggtaaccatgctttaagcttcaagccatcacgcataccaccagcatgttcttcgattacttcacgtgcagtcgtaccaaatggtagttcccaaagaccagggaattttactttacctgaagcaccataaatctttgtgcccggatcttttgatttacctgctgataaaccgatataccattctggaccacgaagcatgattgctggcaagttgttataagtctcaacgttgttcacaatcgttggacgcccccatgcaccagcaacttgcgggaatggtggtttagtacgtgggttagcacggcgaccttcaagtgagttaatcaatgcagtttcttcaccacaaatataacgacctgcaccagtgtgcacgtgtaactcgaagttccagccagaacctaaaatattgtcacctaagtaacctttagcgcggatttgctcaagcgcttcatttaggtattgtgcagcctcaatatattcaccacgaataaagatataaccctgagttgcttctagggtataacctgcaatcaacataccttcgatcaattggtgaggaagtttttccatcaacaaacggtctttaaaggtacctggttccatctcatcggcgttacagatcaagtaacgtggaccgccatcatttggcgccataagagaccatttgatccctgcagggaagcctgcaccaccacgaccttttacagttgcagctttaatgacttcaagaacttcagcaggtttcatacctaatgcttttttaaagccggcataaccttcaagtgcttcgtaatcgtcagcactacgtactgattcttgtttgcttaaacgccaagtcagtggatgagtttccggattaccgtcgccataaattggttttggttcagtattcatacatacttctccaataactgtttgattgatgtcacttctactaaaccgtgagtatcttcatcaatcattaacgttgggcctttgtcacagttgcctagacagcaaattggaagcagcgtaaaacgaccatcttgtgtcgtttgaccaaactgaatacctaattcgcgttggaatgcttcagcaagtgtttcagcacccatcaagaagcaagcaattgaatcacaaagcaaaattacgtggcgacccacaggttggcgatagatacggttgtagaacgttgctacaccttccaaatctgcaacactaatcgttaataattgtgcgatggcgttcatttgagcatcatctacccagccattacggcgctgtacgcactttaatgcatctaaagaagctgcacgtgggtatggatagtgaccaatgtgatgttcaatttcgtggatttcttcagcagtcaaaatcccttcaacattcacacgtggttttttatcagtcagaatcatcattttgcgttacctcttagcgatccacgtcagccataaccacgtcaatggtcgccagataaatgattaagtcagatactaaactgccgttaatcactgaaggaatttgctgtaagtgagtaaacgtcggtgtacggatacgagtacgataactcatcgttgccttatccgaagtcaagtaataagtacttgcacccttcacaacttcagtcatgaatgacgcttcaccagcaggcatgacaggaccccatgacacgctcaagaagtgcgtaatcaaagtctcaatatcttgtaacgtcttatcttttggtggtggaacagccaatgggtgatccgctttatatggaccagaaggcatgttatccaaacactgtttgataattttgagtgattgttcaatttcacggaagtgaacaagtacacgagcgtacgcatcgccttcatactcaaccggaacttcgaagtcgaagttttcatagccactgtatggacgatatttacgaacgtcgaaatcaatacctgttgcacgtaaaccagtaccggttacaccccatgcaagtgcagatttggcatcgtattgagcaacattacgtgtacgaccaataaacacagagtttttaaatgcagctgtgtagtattcgttcaaacgttttggcatccaatctagcaattctttaacaagtttttgccagttgtttggaaggtcatgtgctgtaccaccaatacggaaccatgccgggtgcatacggtaacccgtaattgcttcaacgatatcgtatactttttgacggtctgcgaacatatagaatactggggtcataccaccggcatcctgaattgccgtaccacagtaaagtaagtggttattaatacggaacaattcgttcaacatgacacgaatcacttgtgcacgctcaggaactttaattccagcaagctgttcaacagccatgacatatggcatgttttgcgcacaaccacccaagtagtcaacacggtcagtataaggaatgaaagagtgccatgtttgacgctcagccatcttttccacaccgcggtggtgataaccgatatcaggaacacagtccttcacttcttcaccgtctaactgcaatacaatacggaatgcaccgtgcgcagatggatggttaggacccaagttcaagaacatgaagtcttcgtcagcgttaccacgcttaagaccccagtcttctggtacaaagcgtaagtgttcctgttcgaaatcttgcttcgctttgtcttgcatgtacggcgtatattctgtcgcacgtgctgaatattctttacgaagcgggtgaccttcccaataagttggtaacaagatacgacgaagcattggatgcccttcgaaattgataccgaacatatcgtaagcttcacgttcataccagttggcatttggccagatattcgtcgctgtcgggaggttaagatcgttttcgttcaaggcaaccttgatacgaatgtcactattacgctcaagcgataataaatgatagaacacagtgaagtcagatgctggcaaaccatcacgatgttgacgtaaacgctcatccatcgctgataagtcaaacagcattacataaggacgttccactttacgcaggaacatgaggacttcttgcacgcgtgcgcgctcaacccagactgttggaaactcttcaaaagtcgcctgcacatagaaattctcaccaaatttggttttgagctcttctacgattgcaaatgctgggcgtgaatcaactggtgttgattctggcatagcaatgtcagtttcagccattggcttggcttcctatttaatacaaattctgtcaattttctcgatgaacatatcggttagatatgtcaaaacaccgtcaaaaaattatttaatctcatccatagagcgtaagtttttaacggcaatacgctgcgcattcttacgatcacgttctggcatcatctttggcttatacactggctgaagatcatcaccaatcacggcagaaagcgggcgtcgctctaattgaatctggtcttgtaaaagcattaatgcttggattaatgcttcaggacgaggcggacaacctgggacgtacacgtcaacaggaataattttgtctacaccttgtactactgaatagatgtcgtacatacctccagagtttgcacaagcacccattgaaataacccatttaggttctaacatttgttcatacaaacgttggataaccggagccatttttacaaagcaggtacctgcaacaatcatcaagtcagcctgacgaggtgaagcacgaataacctctgcaccgaaacgggacaagtcatgcacgcctgttaaggtcgttgcatattcaacgtaacaacatgatgtaccaaagttaaatggccacaaagagtttttacgtccccagtttactgctgtatgcaagacatcctctaaacgagtcatgaatacgtttttattcacttcctcttcaagtggatctgtcacaatttgacgatcttgcaatggatattgatcagcatccggattcgcgcgggtcagagtatatttcatcccgacttactccttttcagatgacaatgcaggtgtagtttttgacttaacacgacctgatgattgggctggaatctggcctgtagggtcagttacgagctcttcaatagagttaaagcgtgtaatttcagcaatgttcattgttggtgaaccgactttaatcttctcacctgctaatttacggcgatctgccggtgcccaacttaaagcacctacagagaaggcataaacaagcgcaattaataggtcaacgacaaagattacgacagtggtataacccaaccatcctacttcacgcaccgaagtagaccatgcatagaggtaaagtgcctctaagtcgaaaacaacgaagaaaattgcaactagatagaactttgcagacaggcgaatgcgagcgccaccagcactcacgacacctgattcaaactgctcttgcttagcacgtccccacgatttccccccgaggagtaagggaactgtgagcataaagacgcaaagaaatgtaacgccgatcacgaaggcgataatcgcccagtcgtatggagtaatggcactcatgcggggataactcctggcaggcctattatttaacaaagaatgtatgtattggccttcaaatacaccaaacacaaaattaatcccgccaattgtacctgatttctaatttcccttgctagttgaagcgtcttagtcttttggatgattttccaatcaaaagtaatcatctatgtcttgtagagggggtttcaccgcttataatcggtttatttgatagttttcgcacttgtaatgatttttttcattttctgatttttaatattatttgcacaattgctcaatcggtcaaattaaacaccttacttttttataatattaatcggttttttattgtattcatcttcccctctgaattatgatgaatgtttaatcatgcattaatattttattactcttggataagagtgtttatcattaagggcagctgatgccatactcacttcgtgaattttcattttctacctccctgaaattttttctcttatttaccatcattattacgctatgttgctttattggaattgcatctcgtcctcttagttttcttgcttttttctggcctgctaactcggtatttctaggcctattgcttcgatttccacaaacacgccaaataggtagtttcgctggtgcttttaccggttacatgattgccgatttagttaatggcacacccctttttctcacccttattttaacgatatccaactacctgtatgtagtaacgactttagcactcgcaatattgtttaatcgccatataaaagcagcctatcaaggctattcttatttactcttattcgcactatgcgggattggcagcataaccggtgctttgtttgcagcaacttttgtgcctatgtttaacaccaaatttatgattggtagtttttgggccgaatttggttattgggttacatcagagcttcaaaatgctttattgttgttgcccattattttaaacatccccccttaccttaaaataaaaaaccaccttaagggtaatcgtatatatatcaaagcgattgattttttgcctttattcgctgttttaatttcgataggagtgagttattacgactcgggtccaggttccctactctaccccatcgccgcattaatctggtgcgctatccgctataaacccattattgttgctctcattacatcctttaccagtgcatatattatttatcatgtctcagggcattatttattactgtatccgcaagactatttaggcaataccatttctatacgtatagggctgatcatgatgacggttgcgccacttaccgtttccagtattagcgcactccattctgaattaattcagaagttacaacatgcaattgcccatgatgaactcacctcaagtttaactcgacgccaatttttacagtcagtccgcctactccaagaaaaagtacaaaaggaaaataagacctctgcattttttatgttggacgtcgatcattttaaaaaagtgaatgatagttatggccacttaattggggatagagccttacagacctgtgtaacgaccatacaaaatattttacatcctcatgacttactaggacgttttggtggagaagaattcgcaatttttattccggataccaccagagaggctgcctttgaactcgcggaaagaatacgcattcaaattagtcagcaaccgatttatgtatatggcaaattacccatctttgtgcaggtaagtattggtattagcttatattctccaagctatcaccgttctattgaaagtttgtttaaagaagcagacgatgcgctctatcaagcaaagcgccaagggcgtaatagagtttttatttctttgtaatatttccaagtcatcatctagtgtaatgaattttatacaatatcttctgttttgccatgtatgctaataacagataataaggagaaaaatgcatgaatctagaatatacgcataaaccagactattacttgtttgcacaattactggtgcgacatatagaaagctatattcataaacacccagatgcagataatgccatttttgacttgcgagatgtctatgaaatttttaggcaagatttcgcatcaaccacaacaaacctagaaggcattttacatattgcagactcatatagagttgagactttgaatggggatcagcctcttattcagaaatatcaaattgatgctaaaaataattcgctcttgattgactttaatacagatgcactcaatagcctgagaagcggcaaacctattttggaacctgatgcaactcagttataaatgaagcaataaaaaaagcaccttatgcaggtgcttttttattggtctttaatggcggttgtttaaagcgatgtgctggccaagtcataataaagcgtgcgcctcccaaacttggactttcatctaccttaatttccccaccaaaccagtaagcaatacgacttacgatagagagacccaaaccataaccgccagatgcacgtgtacggctatcatctaaacgggcaaaggcttcaaatacacgcttgcggtcttgctcaggaatacccggtccgtcgtcttcgacacagacaaaagccatgccatcattatgaataccgcccgtaatccgaactttgttatcacaataacgaactgcattacctactagattttgcacgacacggtgaaggtaacgacgctctgcatctactttcacatataaaggcggtggaataagttcaatttctttctgtgtttttaaagcctcagtttcaactgcaacctgatccaacacttcgaagagtacaatttctgcaaaatctagtgaaggtgtaccctgctctagttttgcataagtcatgatttcatcaattaaggtattgagcgcttcaatatctttatcaatcatgtcgacctgatgcatacgatgattgtaatcatcttcttcggctaacatttctgtaccaaagcgaatacgtgccacaggtgttctgagttcatgagatactgctctcattaactcacgttgagcctcaatcaaacgctgaatatggtcagacatattgttataacttgaagccaagtttgccatttcatcgcttccctcaataggaacacgcagtgacaaatcacccgatttcatacggtttaatgcataacgcacctgtcggattttgcgctctaacggcaaaatcaaaccgtaaacacctagacttaataagaataagctaaataaggtaatacccgccgaaagctgtaaaggcatccagttaaacattggaaccggacccagcactaacacttgcgcaggatgattcggtattggagacacaatcgaaatggttgtaccgcgcactgttgcgctatctttgtacaacatgacactttggtcttggcgcaaacgtccaatctgttcagaatccagatttacatcttgaatattttgaatattgatcggatatgagaaatgcttttgaatcttggcaagatattcttgttcctgccccggataaaacattaaatagtcgagcacaaaaataggaagagccttcatttggcgttcagtaattttgtcgacttttatagataagtaatgttgtgggtcgtcacgtaagccaataatgacatatgcaatgctattgcttgcatcgtaacgaactacagatttttgtgcttctatccgctttttctcggtccgagacagctcaaccttacttgcatcggtataataaattggaagttcgagcaaatcagatgcgtcagaaatccaatctattttttgctgcttcccaggttgtcgagcgactccttcactaatgacataagaaataccatcagttaaagattctcggtattcttgtgcgcgttggtagttgataatttgtaccagtaaatacccaaaaacagctaccaaaacaacaagaattaccagccccgcatatattcgcaggaatatactgtgtttaaacactcgaccaaccttataggaagtttaatcagattttacaatccattggtttctttaacaaacaagtaacctttactacgtacagttttaatacgttttggattttcaggatcatcgccaatttttggacgaatacgtgaaatacgtacgtcaattgaacggtcttgaccatcatattcgataccacgtaaacgttcgaagatatcttcacgcgataaaatacggccagcgtttgatgcaagcaaccataacaagtcatattcagcacttgtaaagtcaacaagctcaccgttcaacgttaccgaacggccaccattgtcgatgacgaggtcgtcaaactcaatacgttgagcaacttcatcttcaacagttttatccgtacggcgtaacaaagcacgaatacgcgctaataatacacgtggttgaactggtttcgcgacataatcgtctgcacccatttccagaccaagtacctgatccatatcttcagtacgtgcagtcaacattaagattggttgatgatagtgtgggcgaacttcacgacaaacggttaaaccatctgcacccggcaacatgacatccaagaccacaagatccggttgctcactaataatacgacgaattgcacggttaccatcggtttctacaccaacttccaaaccattacggattaaatattcttgagttaatcgcgctaaacgctcgtcgtcttcaacgatcagaatctttggtaacttttcttcttggctcatatcattgcccctataaatctcattacatgtatcttaaaaatcttgcagatacattcgtttatcatttgcaatatacacacgtttacattgtaaacaagtaggcgttcaccaaactgatacatgacaaccatgttttgttgcattttattaatctttgaattttcaggtatttttattatctgtttattgttcttaaatgtcataatctattcatatttcctatgtatgaatattaaacaaattatttcttcactaaatttaaattcactcaagtgtttgttttttgagttatccacaaagttatctataagtgttttttcacagctttggtatgctatctcccgacaaatcatacagataaaaaattactaaaaagtcaagattgatctaccgtaaaaaatcccgtatcttgtgttgaaaataaactttaactactaagtcttgtgtttatccctcaaatatcgtggcatgttttttgctcggttcaaacggtctatgaacataacaaaagtgacaatggagctatgctggcatgagcgtaattacttcgactcccggtcaaattcaggtgattaaacgcaccggagatgttgctgcatttgatgcagagaaaatttctgttgcgattggtaaagcttttcttgctgtggaaggtcaacaaagtgcggattcgagccgtattcacgaccgtattacccaactgacggaaatggtactgaacactttcactcgccgtttaccttctggcggtaccattcatattgaagagattcaagatcaagttgaacttgcactgatgcgtactggggagcacaaagtcgctcgtgcttacgttatctatcgcgatcaacgcgcaagtgcccgtaaagacacaaattctaatcatcaccctaccttgcaagttaccgatgcaaacggtcaacttcaaccacttgatttaagtgcactgcaagcaactgtaaatcgagctgctgaaggcttagaaggtattgatgttcaagcaattatcgatgaaaccgttaaaaacttatataacggcgtaaaagaaagcgatattgctaccaccatgatgatggcaacacgtacacgtattgaacaagaacctaactatacatacgtaactgcacgtttgcttcgtgatgagttggtcagcactggcttagcattcttaggtttaccggccgatacagctgaaaacaatgcacttgaagcattcttgaaaaaaggtgtagagcttgatttgctttcaccggacttgcttaagttcgatctagaaaaactagcagcggcaattcaaccggaacgttctaaccagtttacctacttaggtttacagactctatttgaccgttacttcatccattcaaatggcgttcgcttcgaattaccacaattattcttcatgcgtgtgtcaatgggtcttgcacttaatgagcaagacaaagaagagcgtgcaatcgagttctataacttgttgtctagctttgactacatggcatctacgcctaccctgtttaactcaggtacattacgtccacagctttcaagctgttacttaacaacgattggcgatgacctttatgacatttatggtgcaatgcgtgacaacgcgatgctctctaaatgggcaggtggtttaggtaatgactggacacctgtacgtgccttgaactcttatattaaaggtacaaacggtaaatctcagggtgttgttccgttccttaaagttgcgaacgatacagccgttgcggtaaaccaaggtggtaagcgtaaaggtgcggtatgtgcgtacttagaaacttggcacttagacatcgaagaattcttagaacttcgtaaaaacacaggtgatgaccgtcgtcgtactcacgacatgaacactgcaaactgggttcctgacctatttatgcaacgtgtgtttgaagatggcgaatggacactattcactccgtctgaaactccagacctacacgatttaactggtgctgagtttgctgaacgctatgcatactatgagtctgttgcgaaagaacagaacatgttgcacaagaaagtacgtgcgaaagacttatggcgcaaaatgctttctatgttgttcgaaactggtcacccttggatcacgtttaaagatgtttgtaacttacgttcaccacaacaacacgttggcgtagttcactcatctaacctatgtactgaaattacgttaaacaccaaccaagacgaaattgcagtatgtaacttaggttcgatcaaccttgttcaacacgttaaaggcggcgtattagaccgtgagaagttagcgcgcactgttaaaacagcagttcgtatgctcgataacgttatcgacattaactactacgctgtaccacaagcgaagaactctaacttgaaacaccgccctgttggtatgggtatcatgggcttccaagatgcgctttacgaaatgggtatggcttacggttctgatgaagctgtgaactttgctgatgagtcaatggaagtgattagctactatgcaatccaaacttcaagtgacttggctgttgaacgtggtgcttactcaacatttaaaggttcattgtgggatcaaggcatccttccaatcgactctttagaaattgttgcgaaatctcgtccagaacgtatgtttgaagttgaccgtactcaacgtttagattgggacagtttacgtgccaaagttcaaaaagacggtatgcgtaactcaaacgtaatggcgattgctccaactgcaaccatttcgaacatttgtggtgtttctcagtctattgagccaacattccaaaacttatatgtgaaatctaacttgtctggtgagttcactgtaattaacccttaccttgttcgcgcattaaaagaacgtggtctttgggacacagtgatggttaatgacctcaaacactttgaaggttcagtacaaaaaattgctcgtattcctgaagaattaaaagcaatctttgcaactgcgtttgaagttgaaccacgctggattgttgatgctgcatcacgccgccaaaaatggattgatcaagcacaatctcttaacctttacatctctggtgcaaacggtaagaaacttgacatcacttataagatggcatggttacgtggtcttaagacgacttattacctccgtgcgttaggcgcaacatctgctgaaaaatctacaattaacacaggtgcgttaaacgcggttaaacctgcaactgtagaagcagcagcacctgcggcagctccagtcgtagaagcgaagaagcctgaagctgttgaagaagacggcttcactcaagcagctccggttcctatggcttgttcaatcgacaacccagattgcgaagcttgccaataacattcaataaagttgctctttaacaaaaagagcaactttaaacgaggtaaagattatgttttttcatctcagccataactatatgcttggtgttggaatcttaatctttgcctttattttcttttatacgcctatggtttacgccttttttaaaatccgtaaacaacagcgtaagcaaaataagttgtagggataatggaccaaaggcccaaaatttggtcatacatcaataaaacttaattttgtttacacattatgagcgtatagtagtgacatcttcgtttagagatgtcgaacatagatatatacaacgaagagagaacaacaatgtctatccttagttgggacgattttgaagatgattcgcaaaaaccggctgcacctgaacacaagtctgcgcccgtcaacccggaaaaaacgcctgattcgcagaatgtatctgctacgcagccatcatcgcagagcgtggcagctccacaatccactggaacccattccgtgcgatcaacaaatccaaccgattcaatggctcgagcatctgaagccttagaacatttggatgttgctcctggccttgaagagttagaaatgggcgcgcaacgcgttcaggttgacgacaaagccatgattaactgtcgcgccgacttgaaccagcttgttccatttaaatatgagtgggcttggcaaaaatatctagatggttgtgcaaaccactggatgcctcaagaagtgaacatgaaccacgatatcgcactttggaagtctgaaaatggcttaactgaagatgagcgtacgatcgttatgcgttctttaggtttcttctcgactgcggactctttggttgcgaacaacctcgtattggcaatttaccgtcacatcacgaaccctgaatgccgtcagtacattttgcgtcaagcgtttgaagaagcaattcacactcacgcttaccaatactgtatcgaatctttaggtatggacgaaggcgaagtcttcaacatgtaccgcgagattccatcggttgcgcgtaaagcagcttggggcttgaaatacactcaatcattaagtgaccctactttccacacaggtacgcctgaaaacgaccaacgtttacttcgtaacttgatcgcgttctactgtgttcttgaagggattttcttctactgtggctttactcaaattttgagtatgggtcgccgtaacaagatgaatggtgttgctgagcagttccaatacattttgcgtgatgagtctatgcacttgaactttggtatcgacatgattaaccaaatcaagattgagaatcctcacctttggactgccgagttccaacaagaagtgattcaaatgattcttgaaggtacgatgcttgaaatcgaatatgcacgtgacacaatgccacgtggtgtattgggtatgaacgcaagcatgatggaagaatatttgaaattcatctgtaaccgtcgtttatctcagttaggtttaccagagcaatttgctggtgtaactaacccatttgcgtggatgtcggagatgatggacttacgtaaagagaagaacttctttgaaactcgcgtaactgactaccaaactggtggtgcgttaagctggtaagttttactgctttcgtcacgcgacacatgagttgacatttacgacacatgtaacaacattatgcgacacatgtaatgccactgatataaaaaatctgacttaaggtcggattttttattgctcacaatatcgtaaggcgacatataagttttccttaacgacaaataaaatttccttgaaataaaaaatagagcctaatagctctatttttttattgaaaattaagcttgcaatataattacaaatccttatggttaattgctgccatcgctttctttgcaatctttgttttaaatctaccatttccactgatcgttcttacggcaggactgacgggttattttacaagtaagaagtatcctgaactcttttctagcaatgcgggacacaagaaaagccaaaaagattatggtattgctttaatcgatgacgacacactaacaccagatcatgcaaaatttagagggttacatctagttaaaattctgattattgcggcccttctctggtttattcccgtgcttgggcttgaccgctaattgacagttgatgtgagatttttgacgcatatttcgagatagttataattcctctatcatgggatacataggttgaaacttaccattacgcaacatatgtaatgacattagaataaaaaaatccgactgacgtcggattttttagatatatttaagcttatcctatacttgtaaagctaaaaccaaaaaaacagaatataatcttgttaaaaatttatagttgggcttcaaatacccctaaatcaatattagagattaatcatttatgagtcattcatttaaagttgcagctagaaccttacgccatttaggaggagaattaataacttctgatgaaatggctcttaatgaattaattaaaaatgcttttgatgcgggatcaaagagagtaaaagtatttattaactaccctatgaatttagcagtactctcaaaaacgctagaagatttcacatctctgaaaataaataaaaacaaagccttagagctaatagagatcaataccaagctctatatcaacccactcaacacggcccccctctctacttttctaacttatattgaccaagtattaaataccattaatgagcaaaataaacctaatatactctctgaaattaaagataatttttacaatataaagatatgtgatactggtcatggaatgaccgaatcagaactcgaatcagtttttttaacaattggtaccccttctaagttatcacagaaatcaaatggagatcgtattcttttaggagaaaaaggaataggccgattatctatgatgaagctaggaaataaggcaactgtaataactaaaacaattgatgatcaaatatgtaattcaatatcttttaattggcaagattttgacaaccctgatttgtatcttgatgaaatcaccattgaaactcaaaaaattaattatccagaaacatttataactggcacacaaattcatatcaccgaactattatctgattggagcttaaaaaaaacagaaatatttgtaaaagaatatattcaaagactaagaagcccttttagagaagggaagtctgattttccaatagatattttattaaatgataccagattaaatataacccctatcccaagctggttaaaagaacaatcaagcctacaggcagaatatatatttgagccttctcagatcaattcagctcttcatggaagtttgatatggaaagattcatcagcaccagatattagaagttggtctattgatgatctatctagaatactaaacacttcaagttcacaattaaatcttttaggaccgcttaaaataaagtttctctggtttaatcgtaaagatctaattggcaccatagaaagaagtctcaaaaatattaaagaagagttaaatttatgggtaggcggatttagtatttatagagatggttttagaataggatttacgggtggattaaatgatgattggctaaaaatggatagcaaggcacttaaaagtcaaggttatactttcaatcgctatcaaactgttggtgaaatatctattagtaaaataaaaaatccaaatttaaaagatacagcaagtagacagtcattagttaataataatgaatttgaactactacaagacctcatatcagaaataattattaaagatacaaaaagtcgaatcgaagatagaaaaaaaatattagaaattgttgcaactgatgcattcataaaatctttagataaatctgatgaatcatataaaaaggctagtgaagccttaaatacattatcaaaaaatggaagccaggaggataaagatattattgacatggcccaaaatgttatgaaaaatcaaaatgagcttattaatcaattgaatgcaaaaatggaaaaggctttcgaaaccaatacggacatattggaattagcaaatttgggacaaatggtagatattattgctcatgaattggctcgtataacagagaatacatcaaatcttttaattcgattaaaaaatagcgaagacaataaagaagaaacatcaaatataatgaatgaattgcgtaaacaaataattgcaactgagaaaagaattagaagtattgatgtattaagcccagcagtaagacaaagaaaagaaagttatgatattacagcgcagtttaaaacaatacttgaaggatacgcacctaaacttcaaagacataatattaattataaaataactgttgatgactcctctgaactaaaaccagtacaggttacgatggttagaggattagtagcacaaattatggaaaacttactgaccaattcagtatattggcttgaccaagggttaaaaattggcgaaaaagaaaaattaattgaactcaatattgagagcgatactaaaattatatatatccgagataatggcccaggggttgacccagcttatcatctagatattttcaagccctattttacaaatagaagagggggtaaaggccttggattatatatagccgcagaaattgcaaaatatcacgaatcaaaattatatttgtctaatgaaattgaacaagatggaaagttaagaactttcatcattgaattaccgaagagttctatttgatatgaaaccaacctcacaaccaagcaaaaagaaaatccttatcattgatgatgaaattgagggtatttctctcaaaaaagctcttacaactgctaaaacattctttgaagctttaagagatcctgatagtgaaattcgggaggaaatggataactttctgaataagcatcaaaaccaatttcaaaataaattggaaactgatggtactgttcatgaggctttttttaaagaagtaattctttctgatagctttaaaaatagcctatccacagtttcattaacttataaatctctttcaagcttatatcaggaaaatgaatggcttcttcgtatcaaagggctaattacaaaagcatttcctactgacgtctatgacgttaaatatttagaaaatgtggacaatattaatattgatgaattagatcagtttgatttattaatagttgattggtttcttgaaaatggttacagccaatctagtgatctacttcttaagctttcagaaaaagataaccttcccgcaattattttattaactagtcatgaaaatatattagagtcaaataccaaatctgacttttatataaaaaccagaattagtggtgctggtttaacgatattaattaaaaaagaaattagggcagaaagttttggctatattggattaagaatgctggctgagaaagccattaaacaaagaccaatagcaaatgcaagtaggcattatattaaacaatgggaaaacgttttagagtcagccaaacagaatactattaagtctttatggcagttagatacatttattatgaaaagtattcatacagatgctatttcagactcccaaccatatagcaatcattttcatgatttcatttcacgtgaacattcatggcatatggaaactaataccacactaaatacatatgcagaaaatttaggaaccgcacttaatgagcacaattacaatgatttattaacacatcattcaaatgaagactccataacactacatagagagttattacaacattattctttccaaggtggtgttaatacattcaaaatccatgacatcactaaagatgaacttcaacagaagattttagaaaaattaccatttggagctgtactagtacatggagacaattcaacctcagattcatacgaagctttcgtcaacatcactcaaccttgtgatctaagtggccttattcgtaaccaaccaaataattcattaatattcatgacattatcattaaaaaagagattagtaaaaaactctatgttttttgatacatcaacctatcatatttatggacttactttaaatgatactctctatgacatgattcctaaaaataaacaactagtaggtataaattttaatgaattttatcaaaaatttaataactataaattagttggagtcttacgtaatgacataactatgagtttacagcaaagtactgcagcctccattattagaccaagccaacctaggacaaacagaccatgttttggtttagccaaactatttcttatttcatgttcatcaacaggagaaaaaaagtgtattagtttccctaatgaaattgaattcttaggttcaacatataaattagataaaactaaaaatctaatacaaattataggaaataatttagcttcagctgctttttgggtatgccaagaactagaatttcaagacaattcagatgagtttaataacacttataggctctttcatgaaagtattgatatctcaaaaccatcaaacatttctcatcagactacagtaagaatgctaccagtggactcttttgatgatcattcacaagcaatacaaggtatccaagataaaatccataggaataagaatacaatttgcttaacttatgaaaaattccacgattaaacttatttatggcaaaccaaacaagcccctgccccctcgtcttccaagtatagatcatcaatatcaatagtatctattctttgggggcgcagtggattaacaggttttcgatgcatagccctttgttttcttagctcataatctttataaatttgcgccaaccgttcaggtttttcaagatcacttagagattctcctcgcgtccaagtaaatggagagcctgaatctattgctgttttctcatatgcctttgcgtcttcaaatgccttaggatggcgttcttttaatcttgcccattcaattttttgttgaaagaaacaaaacgtacaaccacttctagaacgccactcataataagctggcagtccaataccagaggactctagcaaatcataaacgcctggcttatcaatcccatgttcacgaaaaggtaatttaacttctaggtttttatgttgagacactaaaccttgacgatgatcttcatctgcacgaattgcaacatagctatatactttatctccctgatctagccatggcttaatccactttttaaaaggtgtgagctttaattgtctggtacaccaccgggtctgtgcactaggcaaaaaattattatactgacgaagccaaaaatcaaaatcacgatcgccattaatatattcgattttctgacctaaaaaaccttcaagttttgctagaaactcataaacttcaggaagttctttacctgtatcagtaaaaaaatagcgtatttttagttcgggaaaattttgacgcatatagattgcaagagctgcactatccttccctcctgataatcctagaacatgatgttcagtcaagcctcacctccatttatatgctgtagctcttgtatgactttagaacctgcatcaactaaagcagctaggaacacttcttttttatattgtccgttttctaatgccttaattaactgcttagatagaccttcaatatcattagcatcatgttcagaaacatcaaaagagcctgttatagtttgcttaccacccaaaacaatccctatagcctgtctagttggttctctctcacggatactagcaaaaacctcaagacgtctaaattcagttgcccatgcaataagttgaagctcgcccgcatctatatcatggtctgtccatgtatcacttggcttaccaagtgccaacattaataagccttctaactcatgagtatatccactataagatgccatacgagtaataaaagcctctaatctaaactcagcaccaatcccagatatattttttgctcgcagatgcagtaaatctaaattaatattttgttgatctaaagcagtgagtaaatttttctctattttacgtaatctaatttcaaagatagaaataagttcattgatgacttctgaggtacgttcaactattaactctgcattagtagactcaaatacagcaggtaaatcagtaaatagtaccttatggggatctgaagcatgtaaaagcatatctcgaataactttcgcttctttagatagtgaattagttttacgagtccaagctgggagcccaaaaactattgatactaaggctctagctgagtctaatggttcaaccttaactggatagcttaactgtgatgataaagaattagctaagagcttcaacatctttttctcactagttttaagctctacaaacctccaactgattcttttaggtgactgtaaccattcatcaattgatgtttcatttaaatctggggtaaacatcccatctgtataaacggcaatatactgtttatatgagataaaaaaagcccaaactaaaattggctgtaaacctttctttacaccaaaaggagctttagataataaatcaaaaatttcagagagattgactacaccctttgcttttcttatgaaatcttttattccattccataccccaacaatattacatggatcaaattctgcttcaggtgcacatatctgccaagtatcattttgataacgatgaatattgaaggccttaatagttgttctataaaggctggcagctgcagacatattctcaaaacctaagttttcaatattgtcattcgcaagtagtgctcttaaaagatctttctgggctttaactgcactagctgaaagagtatttctattgacaagttcactactaactttaggtgataaattaaaaatttgatcagccaagtctgatgctattttggacagactgccagtaaacgtctgcttaccccactgccataaacaattattaaaagcatattttaactcatcattcaaagtttgcttgacgagttgaattcttgctaacacttctctcatagcaatactatcagaatgcaatttgaggctattatttctaataaactctaagcttgcgagttccttcgctaacccttggatattatctccatttttagggaaaccaattaagactcctttagcaaaagcttttgaaactaattgctcattcttgcctatttcatctttatctttaacaataatatcaggaattacaagtaggaactcaccaaaagcacttccttgagtctggaaagagtcaatatgctttttcacttctctttcagaaataatagaacagtttaaccacctcatagcccctgtattccaataatgtctacgagccgttataggggtaaatgcaagggtattttttaattctttataatcaacatccaacacatttgaagtagcagtatttagtgcagcttcaatatcaaaatcacttcctgcataaacaccccaagcacctatatgttttctaaaaattaaaattgatgctcttgctaaatcatttaaggcatcatgaatttcagtaatagatgcgttaggcactgagcaattcaataactgatcctcagcaacgagtcctgatccatttctaaatatttcgataagagcaattgttttaactaagtttacatgaacatttgaaaagatcgcctcagctctttcaatagcatccacactgattgaccatctatgtccatctacagaagctagtattgcttgttcgaaattaccccgtagatagtcccaaaattgatgaggccaataatagtcaaatatctcgccatccattccttgtaatacttcagaaaatcctagcggctctaccgaagttaaaaagctaaagatactgcgttcattctgaccaaattttttccttgatgcaggtcctaacataacagccattacagggtgaagtggccaacatgcttctaataaaactgaaagattcgatacagcgcttggtcttcttttgtgaataaccttggagacattttcagcaacttttcgtgcttcttcatattgagtctcaacatgaatcgccttgcctattaactccagagtttcatccgtatttgtaactaaaggaatatcaatataacggccttgtactttcgcccactcttgttgaacgttacttcctaacttagctgcatattgctcaaaagattgatgcaaaatcccgataataacaagatttcctttacatcttgccgctgcttcagcaaggtcctgatagaatcctatatcttctccagaatatgctgcatattctagaaattttccaagttcatcaattaataataaaaccccagatttttttggcaaaacctctgccaacttaaccaattgatttatgacagaatcttcttgattaattagtgatttatattgttcatctatggagtttaacgtcgcctgaatttgcgattcaatcgaagtctttttccctactatcggcaatacaatccaaggttcatctgtgtagaaatattgcttaataccaacatttatttcatcacccaatatagagcgtgacaaatctctaatatctttcttttcattaacacaagaagctaaagttaaagcaagagatgactttccaccaccatatggtcctgtccaagtaaatgctttctgttgtgactccagtaaataactacctgtaatatcaagtaactgttttgcaggagactgtaaaatgtaaccacttattgcatctgctcgacctagatcagtatctaaacgaattgagcgtaagaaattacggtgtactgatactaattctgataatttcttactcatacgcacctcttaaaattcgcatttttacagatccccaagtttctgtaccaattctactcacctgacgaattccagaactatcagtccactgcaaataattattagtaatctctgaaattcttgaaagacgatcgccaacggcactttcatctaacttgaatactcgtccaggagatccgtagtcatgagcaattaaattaaatgacaaagttttttgagaagtattagtaatcaattcccattgttcccaaaaatctagtaatgcaaatgcaaaaacctgatcaggcaatgaatattgatttcccctattaaaacggtattgccctttactaatttctgatagtaaaccgattcctgcaagtaaaggttcaatattgtcctctgtgtcatgcgatgaaaaataacacttcatacttgtcgttatatcagttgataacgtgacatcagacctgcctttctgattagatagagctagatcggaaatgagcttcttcacctccaactcagtaaaggtctgattttgaataaaattataaatagaataaatagttgctgtacgtcttgcccttccggctagtaaccaatgtaataaccaaagagtagcttcactttctaaatattgatcgacgccacttttctcatcaaagagtaaatatccaatttctccaatttcgaatccattcttatccgtatgttctctaataacatcacaagctaatgcccaatgtttaatagccgcaaccatattcttaccaacaccaaatcgctcaatagcgtcaggagctgaaaaaacggttttaggagcataatcactatcagcttcataaaacttaaaaacttggtgatatgccttttttaaccacaattgacgtaaaggaaaagtttcatgccctgaaaacataggcttcatggtcgaaggaaaatttattttattcattggctggtgattctatccagtaactattgtacttactgggacattctaccagtagaaacaataaaactaaattgaatctctaagaatagttacgaagactcagcataatgattaagaagtgacctctattaaaaactgataagatgctacttaataatttatataataattcactacttacatcatcctagaatcaaaactctaagtttaatttttcagaattatacataatatattgaaaaataataattttctataaattaatacttgagttttatcttttctccttatatttttaaattattaatggttattaagtaatctttccatgatgagaacatctcaagaagtaagaagtgaacttcagaaacgaggtctatctattgcggactgggctcgtcagaatggattcactccagaattagtccatcaagttttaaattcaaacaaaatccctgtccgtggtaaaagccaccagattgcagtcaaacttggtttaaaagatggaattatagaacctgattttactttcgaaaaaatgaaggagacgcagtgaccagaatttaataaagcacaaataaaaacggaccccgtagggtccttggctctacacctagatatagagacctagcaatccaagtatcttccgtgtagagccattcgtcaagagttgcactggcattttgtttttacagaacgaattttatcgtccttaaaaaacaaaaaagtgcacatcgaatgaagcatatatggaagatatatcatgaatatttttacaactgatgcatgggacaatttcccagactcattacatccgcagattgttgatgcattcaataaaaaacctgatcttgatggcgtcctgcatggtcaacgacatattagtcaaggcagtgtaggaaaaagaacaggactattttctagttataagaataacggaatgattccttatgaaagccaactagaattagcccatgcaatacaacttgagcgaaatccgtctgttaaatactatcgcacccaagccttaaaaattccaataagccacaatcagtttctttatccagactttctcatcaaatatacaaatgaagaaattgctttccatgaagttaaacattcaaaaagatttctagatcagaaagatatcgaacgttatcaacgtttgaaaattctcttagctccaagcggtattacttttgacattgtcgatcgtcatgatttgtattctgacgcggaagcaaaagtattgctgcattacaatcggcgaagtcatgcaagaaactggtctagttttgaaattcaatttgctctatctctgctgacacgtagtacatcactagttaaaaaccaattaatgagtatattaaaaaacaatggtttgcccttggagttgggggaatttctcatctttcataaatatataaagcttaatacgccaaataataaacaaggaggaatctaagatgactattcctgattttattcctcaagtgggtctacgtttttcttttaaagatacaaattttgaagtgacctatgtacacaacaatgtagttcgtttttccgcagtggatggtggaaaaacaagcaacatcccgattaatagcttctctgaaagatataaaactggagagattcaatgtacctcttccccccataagctattactcaatggtcaattacttgataaaactagacgagctgaaaattatataaaagttattattaccacgttagatgactacttttctcataaaaaaattggagctgtaattcctgaaattgctaaaaagatagatgatccgttccctcctagcacctcaacagtgatccgttggattcgtagatatatagaaaatgactataatttgctaaatatttataaggtaaaaatcggcaatagattcttcagattttcaccagagatggaacaaattatatccaacacaatagagcaaattattaaagataaaaacatagctctgacccataaaaatattcagatatatatctatcagaaaatgttggaacacgatattcaagaaaacccaccatcaagacgaactattcaacgtaggcttaaacaatatgatccgtataaacttattaaagcaactgaaggaacaagaatagcaaatcaaacacttaaagcagcaggacgaaagatgaaaagtccattcattttagcaattgtagaaatagatacccatattctagacattatcattattgattcaacaaccaatctcccccttggccgtccttacctaagctgtgcgattgatgtacacacccgagctattgttggttattacatcagtatgcttcctcctagcgcaacaaccaccttagctttattaaagaatatgcttctacgaccatctcagaatttacctggaggtattccctccttaattgttccagataatggagtcgagtttaaaaatacggcactaagccatatctgcaatcatttgaaaatcacaatacagcctgcacaaaataggaacccagataataaaccacatattgaacgttttttcggtacgcttacatttggactaattcaacaattacaaggtacaacattttctaatcccgaagctcgcggcgactatgactcaagaaaacatgcaagtgttaccctagaaaatttgaaatcatatgttgatgaatggattcataatatatatcactgctcaatccactcaatgacgggacgagcaccaatgctattttgggaagatgcttctcaaagttgtccaccattaaccatatcaactgatgaagtagatattattgcccgtcgcccaatcagtagaaaaattcataaaggacaagtcaaatttgaatatttgacctacttttcgcatgcgttagcaacccttgaagcaaatggcttaactgacgttattgttatgattgatgagctcaatttagagcacgtatatatcaaacactcatcaattgatgaagtaatacgagcggactcaacagagcctgattacaccaagaatctctctctgcaagaacatcttgaaattcgcaaggaacttaaactggtatctcaagcagataagcaaagattaggaaaacatcgcgtatggtacgctcgatggaagttatacgaacgcattcaaaaagatgcttgttctaaaaacaagaagttaaagcagttaaaactagagcttcctcaaacacttaagaacctcttagaccaagatatccatacagtgtcccaaccaatagacccgtcagcttcaacatttatctcctcttctgaaatggatcttctaaatcaatcaaaccttgatgatgattttggaacattggagtttgatgatgaataagttagatgcacttgagttgagtaagaagcttaacaacatggttattacttcctcagagtttaccaaagcttatgacggcattacatcttgttcagcacagacgaaagcttatcagaaacctattggcagcttacttattgcagagggtggtcttggcaaaatgacactttcacaatcaatcctgaaaaagaatccttgttatgaaaaacaagaagatggctacacaaaaagagtagtccctgtgttctatatacaaatcccatcgccagcaacagttaaatctgttgctggcatgatgctaaaagccttgaatgatccagcacctctttctggaacaacagcacagatgacagaacgtttgtgctatctcttaaagctctgtgaaacggaactgatcctgatggatgaattccatcatttatttgatatgcaaaaggtatcaaggaagatgaatattgatgtctgtaattggatcaaaacagtgacagactcaaccaatataagttcctgcttaattggattgcctgaatttgcacctttattgcaaatagatagccagcttgcgcgacgctttccactgacatttaagttatctcggttaaatatcggttcaactcaatcaccaggaaccctttacgggttcctatcacaagtagaacaaaatattgaaaaaagactcacattaaaatttttaccgcgattaattgatccattattcgttctacagatttacgcttcaaccaaaggataccatcactacattatttcactgatcagagaagcaatgttattcgcccttcttgcagacagtgacgttattactcaacagcatttttctttggcgtgggataaaggcattacctcatataccaatatgaccacacagaatccttttcatatggacacgtcaaaactagtacaacgaatgaagggtgatcactgatgcaagagaagcctttaataccagcaatcccaacaccatttcctgatgaaaccgctggaagttttctcatccgtctcatcaagctgaatgggcatatccatagctcaactttttatcgatctagaatagatctcaaatacaaagagacactgagctcaataaccacacatgattatctcttccttaacatactcaagaaatttcagcttcctgattatttaaaagagttatcgctcaaaaggcattgttctaccttacgtgggaatgtaatctggaaaaataaactagtaatatcaaattattttttttcaaacgatgtcgaacgattttgtccactttgcttaaaagaaataccctattggagaaaagtttggctagttaaaccatactatgcatgtttgaagcaccaaattcgcttacacacgacttgccctagatgccaatcaacgctcagtagtttgcgttccgaaatctatatttgctcaaagtgcctaggtgatataaggaattgcgaaattgaggcagtatcagatgaacaaattaaacatatccgatggtttttagaatttatagaaactgaagaacaagaaaaattcaatttattaaaaatcttctggtccacacttaaaaaattttcagcacatgatccagtcccaccttcaatagaactattgcttgaaataacctatttattctttatggattgtgattcctctatagaaaggatggttgactggatatctcaaaggtctcatcaagtccatccaagaattcagctagttccattccttattgtagataccaggtattttggacaatatactaaaaagattcttgagcaattgcctgtatccactgaattggccccagaacatttattccatttattaactattaaggaaagctgccaaatcttagatatatgctactcaacgattcaaaggtggatagaaaacaataagttacagtatgtagtctcaaaggatattcctaaaaaccgtaaattcctttcgagccgcgatatagagtatttccttgttcagaaggcacttcacccttctcccaaaaaactgaaacatccaccaagaaaagatgggcaaaggctcactattactaatgtggctgctaaactgaatgttcattatgaaaacattcgttacttgattaggactcgctatttaaaagcagaaaaactgttggtcaggtttagatgtgcttattttattaattctaaagacttagaggaattcaatgaaaaatacatcttggttggcagcttagcaaaaaagctaaaagttatccctcaaaatcttactgaaaagctcgccagtattgatattcatccaattagtggaccacatatcgatggagaatttaacaacatatttttgcaagaatccgtaagacatttaactaaaaaagatattgaaaaaataattaactatccaactcttacaggtcgttatcctagctttgaggagcaacttcctaaaccgccaccaacttacctttctttaaatgaagcagcaaagaaactccatatcagtccaaataaaactgccagattagtcgaaaaaggcgtccttgaaaaagatacatcacataatttaagtatttcaatcagtattcaatctttaaacatgctaatcgcaaacctgcataatcctaaattcatatctgtaaaacaggcacttatacaactaaattgttctgcaaactggtttcatgagtattgggttgaaacaggttttattcatattcatgattttctatactggcattttgttgaaagaaatgagcttaataaagtactaaggttaaagaaaagttatcttacgggcaccgaagcaagcactcttcttggcatgcacaaatctcatgtgacaaacttagagtcccaaggtttaattgaacctgtttatttcggaacaccaaaaataattaagttatttaaacgagaagatgtcataaaattaaaggagttaggatatggggcaatcaaataaattctaaatagttcgctttatatctttgatatcattactcatttagattattaaaattgctctcatcgcaataattagagctgattacgttcctcacgacgttttttgagacgtgcaaccacttgatcttgtggaattccaagtcgttgatctgcttgtgatgcctcaactttgtctttaaaccatgcattgtattgggcttcatggtcggagctatcaaactcaaactctataggatcaaattcagtgttcatgtgcgtcccaatcaatatatgatccaaattttaacagggtttatcctttttaataagagagtacattatttatctaaatataaaaaaccttaggcacttgaataatctaaagaattaaatcaaccccatgccaacatagtgaaaaataaagaaataattatagaagataaatattcaaaattcattttgataaaaatcatcactaaaattagtacatcattaaagaataagaattagcttacaattagaatcacaaaataaacctttataagataaagaaatacaatcaccataatactaatcacaaacaaaggaaataaaaaatgcaaattgaaatattaaaaaatctaccaaatattctatttacaacttactcacctatatggcttgtagtttggttcacaagcatttatcagattataaatatcacaataaaaattgatgatttaatatcaaaaaaattaaataatcgccaatatataaaaacctccttaaattcaatcctaattttttttaaaaaattatcttctgctctacaaaaatctcttcaactaccagatgatattgagccttggtcaaaaaagatacctactccagtaaagaaatttggaatttacattgaaagttccatatggtttattgcatcattaaccacaacaacatactttattctaattgctttattaactattttaactaaaaaattgctaactattcctgattttcttacaatttttggtatttcagccatacttgtcgtatgttcaagattcttatatgtggaaggtcgaagatgtttattaaaagcaaaaaattataataaaattaatatctaaacaaagaaatccttaaaaacctcttcatctaaatctttactttcataaaatctttccatctgaagtccattttcatttaattgccaagaaaagtaatggcttttcttggcagctaaattaggtgtacccaaattattatattctgtactttctttcatttccaacttaaaatacaacgcgtttattccttctttctggaaatccctaaagtaattaacaaacttactccaagaagtatccatatcacctttttgaattgaagatttaaaataataaattaggcaatattcaataacaaatatttccaattcctttggaatatgatcaagtacggagtttgttgaaaatattccaatactattatgtggaggagaaataactgatactttaaaaattaaaacgttcagaaaaatatctctcttttcttttaaatgcaacaagtagtaaagcatatcggaataaccacgatgctctctagtcattgtacgacttacggggtcttttgtttttcctatataatgcacttcactttcaagacctaattcaacattatattcatataaaaaaacatgaattggccatgttattttaacatcttcatcgaacttaaaagttataaatttttcgttaataattattttcttgaaatctcgccaataatcatgatcaatattaacttttcttttttctgaacaattgataattaaatttaagaatatttcaccaatattcttgccaattttaattttccgtgagagatcaaacctaactttaggtctagatgtgaaaaagtaaataaactctttttcattacaatcttttgaggcttcaacttggtcatttaatatttccttataaaactctttatactcttcacactcatccattatcaagtcataccaaataggtgtcgaatactctattgataaaacccacttctttgaattctctttaaaaaaaatgctgtccttaatcttattattaaaataacctcttttcatcttctctctttactatccttgttatgcaatttaaaaaatcatttaaaagcatcctatccaatttatcataagaatcaatacctaatactatattaagcgtcaaaatatgtcgcttatcaaaatgtcatcttatgtgtcgttttactcgtaaaatgttagcttatttgtcttattttcatgaaactatttgtcggttaactatctaactttttgttttataaaaatactaatgtcaacatatgtgtcgcgtgacgacgacatatctaacaacattacgcgacacatgtaatgccactgaaataaaaaatccgagctaaggttggatttttattgctcagaacatcgtctttattagtcaaagaggctcccactcaaattgacccatgagctttaatttattatagtagcctccaataggtgttcctctacctttaaatgtggatggaaaaatgggtgtcccactacccttaaatgcggattgaaaataggcacaacaaaacacatctgatgccgctaaaataagaaatccgacattaagtcggattttttatttcattactattcaaacaattactaatagtattttaatagtctgaaatataacttagttaaatcaataatcctcaactttagtacctttcagtatttttattaattaataaaaatgcgagtttaactcatgacaaaaaatgaattctacatattggtcgatattgagaatatcgggacctataccaggtgaatttagcttattatccattggagcatgtatcgtatctaatccggcaatatcaatatatcgtgagttaaaacctattagctcaaaacatgacttagaggcaattgctgtaacaggtctcaacttagaaaaacttgaagtagatgatttagatctcctaatggctatagtaaatttaaaaaaatggataaaatcatcatgccctccaggccaagaaccaatttttataagacttaattccctatttaattggtcattcatcaattactgttttcataaatctttaatgcaattaaattataaaaccagttaaattcttaaaataataaaagtaaatcaataatatattagctatattatattaatatttctcatatttatttcctctcatttggctaaaatgttagcatttaatatacatactaacttcctctgtaaatgaaaatctcatctaaattttcatttcatcaaatgtccgagttacatccatatgaaatattcatctgaagcttaattatattcattatcaatataattaagcagtgatgatattaagagacaatatatgagtaccgaatacactgcaccttctgaaagggcaggatcaaaagtttatcgctttttcgtaatacttctacatgtgttaatcgcattattcttaattatccaaggtggaaaacttgttagcttaggtggctcaagttattaccttatcgctggtattgcctatctactgattgctattttatatacattcagaaaagtagccagcttatggttatccattttaactttcatcgcaacagttatatgggctgtttccgaagttcaagtctttgacttctggcaatatattccccgtctagttgttccaacggttttatttgtactaagcttatgggcaagccgtagtttaataacgctttcaacagaaaaagtgacttttgctaatcgtgttggtttagttggctttattgcttgtgttatagctttaatctcagctttttttccccatggaaaaactctaaatcaagttaatattgctcaagatcgtaatttaactaaacctacagcagaaaatcctgataattgggaatattttggtcgtagtggtagtggtacccgctttgccccttatactgacattactcctgataacgttaaaaacttacagattgcatggacttaccatactggccgaccaaaaaatattggagtcgatgaaaatactccaattcaaattggtagcacactgtactcatgtactccaactaatattattactgcgcttgatggtgatagcggtaaagcactttggaaatatgatccaaaagcaaaaacagctgaacacattacctgtcgtggtgttggttactatgatgcgactcaggataaaacgctttcaaaagcagatttacaaactcctagtattcaagcctgcccacaacgaattttaacatctactgttgacggtcgtttaattgcattgaatgcaaaaactggtgctttatgtcctcaattcggggtaaatggccaagttgacctgttaaatgacatgggtcctactgaaaaaagtaaacgttaccatccaacctctaccccattaatcgcagggcatgttgctatcttaggcggttgggttcgagatattactcatggtgaaccttctggcgtcgttcgtgcttatgatgtacgtactggtaaactagcttgggcttgggatgtaggtaattcagaattatctggacaacctaaaaacggttttactcttgaaaccccaaatatgtggactattccaacctacgacaaagatttaaatctagtatatctgcctactggaaatggtccacctgattactggggcggtgatcgtaatgcagcaaaagaaaaatttggctcagcagtagttgctgtagatgcaacgactggtaagactaaatggtcatatcaaattgttcatcacgacgtctgggactatgatttaccttctcaacctgttctttacaatgtcaccaatgataagggagaacaaattcctgcccttattcaaacaactaaaatgggacaaatttttgtattagatcgacgtacaggccaacctattactaaagttattgaaaagcctgtaccgactacaggtcatgcagaaggagaaaaattatccccaactcagccatattctgtgggtatgccacaaattggtaatgacactttacgtgaaaaagatatgtggggtatttcaacttttgatcaactcaattgccgtattcagtttaaagattcggcctatcaagggctatatacaccacctagtgagaaaccatatattgaatggccaagtttattaggcggaatgaattggggtggtatttcaattgatgaatcaacaggtttaatgttcgtcaatgatatgcgtatgcctttgcggatgtctttagttcgtaaagaagatatggggaaatacaaaatatctaccgatgaagttcctggatttatgggaacagtacgcccacaatttgcaggtccgtacgctggagtaaaaattgacattatgcaatcagcattaggcgtaccttgtaatcgaccacctttcggtacaatgtctgcgattgatttaaaaaccaaaaagctggtatggcaagtaccattgggaacagctgaacagcttggtccattaggtattaaatcacatctcccaatgccattaggcatgccaacactaggtggcccaacttcaacagcttctggcttggtattttttgcaggtacgcaagattattatttacgtgctctagattccaaaactggtaaagaagtatggaaagctaaattacccgttgcagcagttgcggcgcctctaatttacaaatcaccaaaaacaggtaagcaatatgtagttatttctgcagggggtgcgagccactcaaaagatgtaggtgactatattattgcgtttgctcttcctgatcagaagtaaccgaaattagccaaggtagacgtctaaaatttagaaatttaattttggcttaagggtaatttggtaacttttatcttgtacaaaacagtaaaaagctggcttgttcccaagccagctttttactgttttgtacaccagcattgaaagatttatcttatcattcaactcaacctaagttttttatttaatctaccaatttaaaaccagccgcttcctctatatctttcaaatacttatcaaaagccactctcaaatgtttagccttaaatatattcttactccaaaagaaaacatttaaaagtaatctattacttaaaagccacgctcttgctgaaaataaactggcattattagatttatcaaatttagccctaaaagcatatgccttataagttagcagaaattcatctttctcagattctaaaaaatctaaattccaccattgtccccatctataaacataacttttctttccttgaagaaaacctaaattatctacaggattaaatatagatttcgtattattttttagatttatataagtattatctttatcaaaaacttcttttaactcaatcttaaattcattataaggttcatacagctggccatttctccactccaaatttctaataggaatacttggtaaagctaaaacgcaaggcttactcgttaagtcatgaatctctatcacagattgatattttagattacttaaagaagcagtaacgcaaaaaataactttactgtaatgttggtcattatttgctttcacccatagtgtgcaattagtctgctgctttcctagaaaaatttgattccaatttatactataatttacaaatccccccaaatccttacgccacaatagttgtaggtctctagaggtcctatatgcagttgatactttataggcatctaaaaacaaaaatttagtaatccattctattggtttttttaaaatcgggccaaagatagaaagaatgatttttatagcaaaattagttgcaaaatttataggttcagccattttataaactactcacttttatatattaaaaatatgatcttacaaagaactaattgaggaaaaagcgccgaaaaatggaaaaactcccaacccaataaaaccaaaaatagaaaaaatgtaaaatggagctgaaaatttagcagcatttaatatctgtatcattctttttaaataaacctcaaaaagcatataaaaaaagaagaacactcccattaaaagcattattatattaaaataataactacttattaatggtataaaatctggcaatttatcatatgaatttactatatgcttactccccaatataaaaactacaattgctgtaaagtgtgcaagtacagcatgcaaatataaattcaaaaactcttttttaagtcctaatttatcactattcatacattatcctgcttaaatggttagtacaaatattaataagaaattttattcttagactcaatccctaaactcacatagaacgtcaagatatgtcgcacttcaaaatttcatcttatgtgtcgtttttcttaaaaaatgtcatcttatctgtcgtattttcatgaaactcattgtcgcttagctgcctaattctttgttctataaaaggcaccaatgtcaacttatgtgtcgcatgacggctttcccaaaaagccgctcatctagagtggcttttttattaccagaattatttaggctcagctcaagcctcatttatttattctttattcaataaatatttaataatttatacaaggctgttctgaacttaatcctatataagttatattcttttaatttaaaaataaataatataaaaatctaaataatttataaaaacaatttaaaatactaaaataaaaattattgttttaaaaagaattttgttaaacaaataaaataaggtgtcggctgacccactctggcttttaaacgaacgaaaactcagccgacggcgtagatataccaaattattattacaaaaacttatatccctacgattattttacaaatccgaataaatactcaagtaaaaatatcacaaaatttatctatattatttttgtcactctcattatttaaagcgatagctttaaaccctataaataaattaaatttattttaaaaacaaaatgttatagacacagtcattttaattttaaataaaaattattttatttcaaaaagataaatcattttttaaatacatatattattttaatcttaaaaattttttattaactcagcccattttttatgtttaaaaatgttattaaaaataatcgtattttttattttgttgattttgaatatatttaaaaactcactgtatcagccgtgaaaaattacacaacttgacaccaaatagtaaaaaattaaatactctttctcaattatgtgctctaaaacacataatcaataaatagtaataacaacatctcaaacaaatcacatggaaatagattatgtttattaaaagtattttatcttcgattactagtattatcccacttcctgaaaatagtaacacaagcagtaatttaggtaacggctctggtgacggcctacttaatggaatatcttccggaaatggtgaacacaactatggtattggcaatggtattgcggatgacgcaagtattaccgccccaattaccattcccctcaacctatctggtaactcaattactctcataggcaattcatcttcaagttcggtgaatagctctccaaccaccacttcaaataacgttaatgacaacgacgtaacgaataatggtaacggctccaccattggtagtggtacaggcaatggctctggtgacgggcttttaaatggcgccgcttctggtaatggtgaacacaactatggaatcggtaatggtattgccgatgacgcaagcattactgccccactttcaattccaattaaccttgcgggtaactctattaccctaattggtgactcatcttctagttcggtcaacaactctgcaaccaatacatcaaataccgtgaatgataacgacaccacctataacggcaatggctcaggtgctggtaatggttcgggcgatggcttgttaaatggaattggctctggcaatggcgagcaaaactacggtatcggaaatgggattgcggatgacgcaagtattacagccccaattacgcttcctattaacttgtctggtaactcaattactctaattggcaattcatctgcaagttctgttaattcctcgccaactacaacgtcaaatactgtgaatgacaacgacaccacctataacggcaatggtactggtgatagcggcgtgaacgctctgggcggttccggcaatggttcaggtgatggcgcaggtaatggtatcgcttctggcaatggtgaacataactatggtattggcaatggtaacggcgacgatgttgatattactgctccgatcactggtgttctaaacatttcaggaaactcatttactctcattggtaattcttcatcaagttcagtcaatactgcgccaaccaccacatcaaatacggtgaacgacaatgacaccattgataatggtaatagcggcggcacaggtagtggttcaggcaatggctctggtgatggtttacttaatggcgctgcttctggcaatggcgagcataactacggcattggcaacggaaatggtgatgatgtagatattaccgcaccaattacaggtgtttttaatttctctggtaactctttctcactcattggcaattcatcttctagttcaattaatactgccccaactacaacgaccaatacagttaatgacaatgacgtgactgataatggaaataatggaggcgggcttcttggtggaagttctggaaatggctctggtgatggcctgttaaacggcgctgcttctggcaatggcgaacacaactacggtattggtaacggaaacggtgatgatgcagatttcaccttccctcttactggcgtacttaacttttccggcaactcgctttcaggctttggcagttcatctagtgaatcggtaaatgttgcaccaaccacagcaactaataccgtcaatgataatgacaccattgataatgccaatacaggtggccttggtggcggttcgggcaatggctctggcgatggccttttaaatggtgcagcgtctggtaatggcgaacataattatggcattggtaacggaaacggtgacgatgcagactttacgcttccatttactggcggtttaaatattctgggcaatgctttatcaggtatcggcggttcttccaccgactctattaatatttcaccgacaactacttcaaacacagtcaatgacaatgacactaccaacaatggcaacacttcaggtggtgtgattggttctggcgactcaggcaacggctctggtgatggcctattaaatggtatttcatcaggtaacggtgaacataattatggcattggcaacggtaatggcgatgatgttgacgttgttgcccctatcactacaccacttaatgtattaggcaactctttctcatttattggtggtgaaggtacaggcgatatcttaggtccgattactggcattattggtggtattggcggtgatggagatatcctaagtccaattactggcattatcggtggtattgatggtgatggagatattttaagcccgattactggcattatcggtggcataggcggcatcggtggtgatctaggcgataacccacttacaggtattattcaaagcggtattgacgttctacaaaatttagaaagtttaaaaacaggtttgattaatacaggtattgatacgattgccggaacaattattggtgtgttccctgatgcagagcatcctgtcggcgattttgcagaccttggaaaactacttttcgagacttcacgtgatagtgttaacggtacgcttgaggctatttctgaccttgcaggcgctgaccttgagggtgcaagtggctcgattactggtgtaattgatactcttattaccaatggttcaacggcatctaccattattcagcatattgtaggtgatgacctagtcactgaaaacggtggcctcttgggttcaatcaccacgattattggtggtgttgacagcggcgacggtggtttactgggtggcctagatggcttaattagcattaactatggtgactcagacaatagtaattctgtagatgtagaagatattttaggaaatatcctcggctcggtaggttcaaatcaaggtattgctgttggtgaacctgatccaacgggcggtagtttgattcatacgatttcacttaacacagtaaatcagttaactgaccaacttttacatgctttaccaactgtctaatgtgttcgtaaagatataacccctataaaagcacctttcaaatcttgagtttggaaggtgttttttattaaagagcttttgacagtaatacgctcatgcttatagaccattaatccagatctaaataaccaaatacagccttttcaactcgctgttgtaaatcatttaaattgctttcccctgctatacctgccgcgttaatcattcctttacttaaagcaattacatcttaaatggatatctgagatgatggacttacataaagagaagaaattctttggaatacgcaagatgccataatttctcaaagatcatcaatcttttccagagtacaaaactgagccaactagaatcgcttggcctgcaatgctaacgtgtaatattgaatctattttctcaactgtcactaaaactcgccctggtttttttattgcgagaccttgatacccccaatagcttactttctggtcacattcgattaaatcgtggtgaacaaggtacgctcccgctgggccatttgcattaccagttacaggatcttcatttataccgattgcaggtgcaaacattcgaccataagtaataggttcttgcctactcccttccaagacaaaggggaaaaaaccattgcaacctatttcagcactaatagctttcaattttttattgtttggaattaattcatcgagtttatttctgctcaacattggcaccatcaccttggaatgccccgtcgtgacaacttgtattggtaaatccgcaaaatcactttcactcacaccgagtgcgcttgcgagttcagtccgttgactctcattaaaaggtgataaaaactctacacgaccttgagtcattttcaccagtaactcttttgaactaccaaatattgaaacgggtaaatgaccagctcctgtttttgcgattaatggatagtctgattggtggcctgtagttgcacgtaaaaaatgagttgcgattgtggcatgtccacagatcgggacttcatgtgtaggggtaaaatatcgaacatgtatatcatggctctgatctttcggtgacaaaacaaaggcagtttctgaataccctgcaaatgcagcaatatcttgcatctcttgagtcgtaagatggtccgcatctagaacaacccctgctcgatttcctgtatttggtttagtggtaaatgcatcaactacataaatggtcgtcatggcagaactcctctgttattaatattgtgatctcagaaatagctcctgccataaccagaaaatcttatttaattgcagcaagacatatcaccgctcaaaaacgtttatggtcgtctcatataatgagttttgagtctttgcaatggttgtttgaattgtataaatctaaacatcggcgatactatagtttttattgcaaacgcattttctaaatatggaaaggtatgaactgggacgatactaaaattttgttagctattgggcgaactggcgggttgagccgcagtgcaaaattgcttggtattagtgtttctaccgtacatcgcagagctgttgaactagaaaaaagtctcaatgcggttcttttttctcgagacagtgatggctatacactcacccatgttggaaaacatttttttgctttggctgaaaaagctgaagagcatttaatagcgatggaacgttacaacgatcaagggcaacaatcattgttccgcattgctttacctgagttaattgggcagcagttgcttcaatcaaagctaacagcattgcaactcaagcatccagatttacaattagaaatctcaacaagtgtcgttcctgttgatttttcccgacgggaagctgacattattcttcgacttgtccgaccagaaagtgggcgttacattattcggcgacttggtcaactggaatatgggctttattgtagtaaagattatctcgccagtttcacaaagcatgctgaaacggctgatgatttactgaatcatcgtataattggttgggacagaagccttcaatatacgtttttggcacaatggatgcgtgaactcactcaagacgcggcccctgctttgtcttttgataacatgcactcgcaactattagcagtcattgaaggacaaggaattacagccctgccttgttttgttgcaaaggctttgggtttagtacctatactacctatgcaaactttaaaacaagatgtgtggttaatgcgtcatttagatactaaggatagtgactattcaacgttaattagtgagacgattgaaaaagagctacaagaatatctgttgtgattgatgcgatacgagactctgagttttgtacagtaccctactttgagttcgtagagattattcctgcaattgaagatgggtacgtggaatatgaaagttctttgtaaaggtttcaaagaaccttttaactttgtactaacacgaaagcatttagtagtgtctttaaaataccctactaaataattatttagatttaaaaatttcgaaatttaatctgtatgtcaaaaaatttatcaaacatgcttctctaattctttctttaaataaatcttgaaaccaaaagtttgttaaaaaagcaacaaaaaaagttataaaagttctaaatgaactattttctaatttatacacctctacaatactatcaaaaaaactctcaattaaaacaaagaaagaagaagttattgaagatataactatgtaagaaaaaatcttataaaatttttctgaaagcataactatttctccaaaaacttcaaagtttattattaaaaggttattaaatatagttacaaagccgcaagaaattttataaaatatgacctaaaataactacatacttgtatataaattcttaatagattttattcatttttcacttcataagatttaacccatttagcccaactattcaatttattgcctgaatattgagtagttacatcagtccattttaaatcatatttttctttaagcaacttacctaaagcctgtcctgatagtttatcagcagaatatagctctttaatttcaagcatagcttggatactaaattctgaattagctttagcataaaccacagactcaaaatctttaatatctaaaataaattcattatctattaattcaaatttttttaaaatttctaaagccttattagttctaccatcatttattaattcttgaagattcttacctgcaatctgaggatatatcgatataaataactgaggtgtaattcttggcacaaaaaagttagaagtacgtcttctactcatcacagaagttttgggacttcctaaatctttataaatccatgtatttggctctgtagctggctgtaagaaacctgttaattctaaccagcgaataagtctaatagtataagatctccaagtcttatctgcatatttattatcaggataagtttctttcattaaatctatgaaatttgtaattgttaataatgttccacttgaaaggtcttttagatgtaaagtaataatatgtttcttaaatttttctctaattatattcagaatattctcttgtgtattttcttcttccaacaaatcttccgataatacatattgtgagttttctctagttgctaaaccaaataataaaacatcagttcctatattttgaattgtaccctctgaaaaatcagttttttcctgcaactgttgaatagaaattggtttcttagacaaatactttacaacattccatattgttgaaaaatcattagaaggcaaatatcttaatgagataataggaacagtctctgttaaaatatactctctaaatatatcccaataaatatttaatctaataccactttttataattaaacgtttatgcagtaaacttgtaactatatcttcaccacacgtatcaatagtgtcaactaaatcaactggtgctttctgggcaataaattttagagcttttatttcattagaatttagctcttctaaatcacttgcaaataaactagatatatccagtttattatctaatagatcttcttgtttttggccagataaaatcttctcatgtaaatggatacataatttttttaataaccatggatatccctgactactaacaattaaattatgccttaaatcactatggattttttcaccaattacttcctcaaacttattaattactgcatgcgactccctatctgaaaaaggatttaattttctaacaatccgataatctgataatctatgccaaaagaaatatgcattatgttctgaaggcattgtactatcagttttccacgcaaacccaatacataaattagcttttaagctagctgcatctaataaaatattacttgcattattaaataattccaataaatcaggtttactaaataattcttcgaattgatcaaaaactaatactatgagttgtttcgaggtattaagactatttaaatattctgctatagattctgattctagtggatgattaacatttgtaatttgtaaatcaatctttgaattaccgaatcccttcttttgtgcttcttttagtgtttttaataatgcggaatatatatagtcaggagactttgctgcccttacatcaatagcatataagaacaacttttttttctgatgaagattttttgctttttcagaaagggtaataattaacgagcttttacctaaacctgaattaccagtaattgcgaaaattcgtgtaccgatttctttttctcttatttttttaaaaaaatcaaatatttcttttatatctttcgttctcccaacaaagtcttgaggtcgtgcaggtcgatagtcattccaatcctcacctctttgcacttctactacttctatttgggaatcaagagaacttttaatatctttctttgtatttataagtttggaaaagtctagtttagatagactacagtcagttgaggcaatattatctaaaagtgcctgatcttcgactaaagttccagtcttagcatgataacagataacatttgttggtatacctgcatttaagatagtaacagcccaaaaaattccaaaacttgttattaataaataccattctccaaccttattcagatcaatataactttctaaatgttcttttggaatattgctaatgattctagaagattgtaatgactgaacaatatctttaggagtgtagataattactcgatttccatgaggtcgatttggtaactcttcacaaagcccttttgcatccttactaaaatcagaagtcccaattagccatccttcgtcatagtcctcaaatacaacagtaccaagtaactgtcttattatcgtcgcatcaatctttttatcccgataggctttacattcaacataaatttttttcttagagacattatgcttacatagtaaatctaattcacttcctgttttacgtacttcttcatcaacatgataattttgagcttccagcatatttttacttaatttttcaagcaagtcgcctttatcttttgttgtagctgaattaggagtacaaatttcaatgttcattataaatactcaagatttaataatttttcatgaagtatacaataccaaaactgatctatatctaaaaatacttaaaaaatagaagttttactttccagattaaaagtaaatttatttttagaaaattaaaactctcacctttaagaatataagttaaagagcctaggtgttaaatttataacacctgcccccaaaacttctccaaaaccacatctcgttcatccaaatttttagagcttaaaacctgtagcatcaggccatctataaggtttaaaaccatgtctgcatcaaatttaaaagcacgggtctcacagctaaaaatcaggtcaaaaagctcccgatgtagccattttcggtattcaactgccatacggtaggcttgcggatacagccgttttatttcaaaaaccgctttaagcagcaaatggtacagactgtttaaattggtatgtaagacaataatttctttaagtttatctttttgggtgtagtaacggcttgagtaaataatcgagagcacttcttctttgagtaggcttttttgaaaggcgatgcacatttcaattaggcgttctttggagtggaagtagttgtaaaacgtggctttcggtattttggcttctttgataatgaggtctacccctgcattatggaacccatgcgtggtaaagagttggattgcggtttggaccacctgtaattttttggaaggtatttctaaagttggcatagttttaccgttataaattcttgttgtttctaaatgagataaaaagcctgtgcccttttgggagaaaaaaggcacagcaaagccgtaagacggtgcttggcacatctcaagttttattgttgatataagtttttagccgtaatgacttaaagtctgaaaagcggttaagcctccaaactgtttaaagatgaattaagtggtgtcgttatagcttttggcactgagggccaagaaatgatggatgtgcatagccaactcctgattttgggagttctgccaaagcattcatttggaattatggtggcagaacgaaagagggttagcagactggcttcgagaacccagcacacccgaaggtgtcccccttccgtcctaccgctacaaaaagggagacgagtgggtctacatcaaaaaaacgagttttttcaatgtcctcaaagatcggtctgctaaaaccggctggcaatgtggccagcacgcaaagcataatctgagagttaagatgtgtcaatgtggctttaatgacaagtgattaaatttcttattgtttttcattagattaacttaattattatttaagatattatatttaattgtatttttaaaattaaacacaagcgatccgtgcttattgatttcttaatgagtcttttattatgaaacagcgaaatgataagtaggattagactgtctctgtctgccccacttggtgataagcacggttaaagtaaaccaaactttggtcatgttggctttgtttaatcgccacaatcgggcatataaaaatcgtgtgtgtgccgacttgttgaatttgctcaatctcacaatcgaagctcaccaaagcatcttccaacacaggtgcgcctgtttctaactcaatccattcgccatgtttaaagcgttcttctggtgtgagcttagatgaaaatgcttttgaaatatgttcgtgatgcgcgcctaacacatttacggttaagattttgttatctaggaaatgtgcatgtgaactcgcagcttggttcatacagaccaataatgtcggcggtgtgtcagtcacactacaaacagcagaggcagtaaatccaaaacggccagacatgcctgccgtggtcacaacactaaccgcacttgtgagtaaagacattgcatttctaaagtctgttgcttgaaccatgacattattcctaaattgaaccgtaccttttcctgtgtgtttgctataccgcccaactccatcaggaaggtactatcgacatgcgatctgattagagcgacatgtagtaagtaaaatgagggttacttgtttgattatcaaccaccatcaaaaaagtaaccctttataccacttattggtaaatattaagcagtaagatcataacccgtcagttctcggcgaacgatttctgcacctgcacttaaggcatttagtttgccgcgtgccacttcacgagaaagaggcgccataccgcagtttgtgcacgggtaaagcttgtctgaatctacaaactgaagcgctttacgtagtgtgttggcaacttcttccggtgtttcaatctggtttgttgcaacatcaattgcacccaccatgacttttttaccacgaataagttcgagtaagtcgattggcacacgagagttgtgacattctaacgagatgatatcaatgttagaagtttgaagtttcgggaaagcttcttcgtattggcgccattctgaaccgagtgtctttttccagtcagtattggctttaataccgtaaccatagcaaatgtgcaccgcagtttcacattttaggccttcaattgcacgctctaaagttgcaataccccagtcatttacttcgtcaaagaagacgttaaatgcaggttcgtcaaactggataatatctacaccagcagcttctaactctttcgcttcttggttcaagattttggcaaattcccaagcaagcttttcacggctcttgtagtgaccatcataaagcgtatcaatcatggtcattgggccaggtaatgcccatttaattggctgatcagtttgctgacgtaaaaattttgcatcttcaacaaatacaggcttttgacgagacaccgcacctaccacagacggtacgcttgcgtcgtaacggtcacgaatacgaactgtttcgcgcttctcaaaatctacgccattcaagtgctcaataaatgtcgtcacaaagtgttggcgggtttgttcgccatcgctaacaatatcaatgcctgcaagtttttgctcgtgaagtgctaaacgtaacgcgtcttttttaccttcaactaagccttcgttttcgagtttccacggcgaccaaagcttttcaggttctgcaagccaagacggttttggtaagctgccagcagttgaagtcggtaataactttttcataataaatgacctatatgttgattaattaggagcgtaattcgcagaccactgctcaagaatcgcttggtatggtttgataaattgctcttcaacaaacttcccctgctctatagccaaacggctacgttcttcacggtcatacacaattcgagtaagtgaataatcttggtgcttcaagcttggttgataagattttccagccactgaatttgcattgtaaatttcaggacggtaaatcttttggaaggtttccatcgtactaatggtactaatcaactcaaggttggtgtaatcactcaacaaatcgccagtaaagtagaacgctaacggtgcaacgctatgcggcggcatgaaatagcgaacttttaagcccattttttggaaatattcatcagttaatgaatagtcttcttgcttgtattcaacacccaaaacaggatgttcgttttcagtacggtgatacaccttacttgttgaaacgcttaagcaaatcacaggtgcctttttaaagttggctttataagtctcagagttaataaagctcttaaacaagttgccgtgcagttcaccaaacttttctggcgtgctaaacgtagacttgtttttgttgtggtctaacaacagcacactaaagtcatagtcacgtacataagaagagaagttgttgcctacaataccttcgatgcgttcattggtctttttatcaacaatattggttttcaatatttcgattaaaggaagcccgctagtacggttttcggcatcaatattcatttcaactgaaatgatttcaagttcaaccccatagcggtcgcccttagggttgtcccaatgagctaaggcgttgaaacgattgtcgatcatccgtaatgtgttgcgcaaattttcttcgcggctcatccctctcgccaagttagcaaagttggttgtaatacgcgtattgtctgctggacgatagttctcatcgaaacaaatactcttaatcgtaaatgtaaattctttactcattgtgatcagtaccctaatttctgagataaacctaaaaaatctttttgctctttttgaactttccagccttgtcagttttgtgccttgtggtcttatcaaaagtgaattactggagcgcttcagagcatggatagatttataccgcaatcacaacatgaataaaaatgatttagtctcattcaaaactgagtgaaattcatgtttagggttttataaataagtatgaaattaaatatttttcatcttagggaattttagacaacagaagttcaatgtatgacgctcacatagcgctttaatcattctaaatatttatcattattttcagatatttattaagaaaaattcaattttagaagaatcaacttaaagtaatgtgtgctgactctcattcatctctgcttttagccattctaaaaatagggttttgcgtggatcttcctcaaaagcacgatgagaaagtagaaaataggctgaaccatcttgaacgattggtgaatttttttgcaataagttccattcaagctctttttcaatcatataaattgaaatgaccgtcgcgccgagtcccgccaaacaaccttctaaacataaataaaaatgctcgagttcaactttggtgtagccttttaagctctgctttaactcagcaatgcggctcatgtttttgaaaaaatttggtctagaagtcgaaatgagtaagtcgtttgtttccgatggcttggttgcttgaactagagcgatatattcatcggcaatcttttcgctatagatatgctctccccaatcaaagtcatttcgacgaatcgcaatatcaatattatctttttcaaaatcaaccacaccgcctgctgtgagtagcacaacctcaaaatcatgcccgagctttttaaattttgataaccgcggaatgagccatttcatagaaagagtcggttcacaggacaaaaccagttgcttgttttgagttttaggctggctgagttgtattaaacattcatcgagttgaccaaacacctgatggcaacaactcaataaagtttcaccctgctccgtcatcacaagcgttttattttttcggtcgaacaaagtcgtatttaaagcttcttctaaattataaatctgtttactgaccgcactttgcgtcacaaataatttctttgcagctaaagtcacgctgccatacttcgctacaaaatagaaaaattttagtgaattcagcgatattctttcaatcattccaaaaactcataattatgttgtcgtttttatcgatttttatttttaggtttctgttcaaaataaaaatcatctttattaaaacctattttagatgatgaaaaacatattgaatatcgatatctatcttcacacatataaagccccaatctttctcaccaaaagaatagcagctttaagtagaacagctctcgtctcaaatacattccaaaaagtacagagcattcccctcgttttcagtgaaggggcaaaataatggcagagttcattgcggttattctcattacaattttggcagtgattagtcccggagcagacttcgcgattgtgaccaaaaatagttacttgtacggcagaaaaataggtgtgttcacttcacttggaatatcgcttggtgtgttggtacatgtaacctatacattagtcgccgttgcctttgtgatgacttatacgccgcaaattttgaatattgttaagtatattggcgcgctttacctgatctatattggctataaaacttttactcaaaaacctgttttagactctgctgctttaaattctataggtactcttcaagcgataaaatacggcttttttactaacgccctgaaccctaaaaccacgctatttgtgattagtacctatacgcaaattgtgagtttaaccacgcctaaaaccattcttttagcttatggcttttttatgtcttttgctcattttgtatggttttcactggtggctgtactgttttcatccatactactgagacagaaaatgttagccaagcaagtccagattaatagggtgattggttcaatcttatgtgtattaggggtgattctgctttttactaagtttcagtagagccgcttaatttttaagaaactctatagtgagtttatggttaatggactgagcgcttcgtacagaactcagtccatttgagtgagataaaaagctatgttttaactttttgactctgataaatcatttatgttccaacgatttgctcttttaaaggttccaacatcgttaaaccgtactcccatatcacgcatgactttatgggcaaccggtgccgtcatttggcgaatgtagaatggttctttcaccacaaaatggtggatggcatgcgttgaaccaaagttaaagcaaaacagttggaacggcatcatccaccaaggttttaacacctgagtttgctgaatgacattacccaattcgacatcgccgtagtaatgcatattgctagtcacaaagtgcaagcagaaggtacgcagtacattcggtgcaacccaaacaacagtcaaaatattaaccacatgcataatatttaaagtggtagctgaccaagcaatcggtgcattcgcccaacttaaaacagcatctactgcatgaaaacctaaaaagatataccacagcgaccaatgaataattcctaacggaaaataagccataaatgcacgtttaaaaattacttttctcaccgtccaattgcttgcagaaataatacggaacaagaccgccaagccgttatcaccaatcgcgatgagtcgacgtatgctccactgctctccattagttaaagctctttcttctaaatcaacttcggtgcctgagtttttatgatggttaaaatgcagctcacgacgcttccacgggttaatggtacttggtcgagctaaccagactaagcccatcattaaatgatgtgcccatggtttctttctaaaatacatccagtgaatcaggtcatgctctaactcatgggtgagcgatgcgaaaaaagcaataatcggaattgcaaaccaagctgaaagttgatgatttatatagagcacggcagtcgctatcatgccgaccaaagatataaatagaatcatcgccccaatggcattttgatggttcaaaataggatgacgtttgcgtaaagccacgccttctgctgttactacttttttaatatgttccgttttttcgctatcggtcattccggcaggatttttataaatataggtcatccgttattcctcagtttttcatgcctctactttatttagatcaccctaagtgtgcttagctcgaaacgccaatctattggctatggatgccaaaataaaaagattcagaataaacaaaagattttttagttttgaatcttttatactgttcagaggaatatgaatcacaagttataggacataacatgccacagacagcaacggcactggctagctgggtgaaagcgattcaaaaagcgctcgaaaaagccggtgttgatagtcaacctttattagaacaagcaggtttagatattcaggctctgagtaatcctgatgcacgatattcattaaaacaaacagcaaatttatggaaattagcagttcagaaaactcaagattcatgttttggccttaaagttgccagccaagtcaatcaaaatacttttcatgtgttagggcattcactgattaccagcaccaccctaaaagagatgtttctaagaattattcgttattttcgtgtggttacggatattccagagctagagttttatgggcaaggaaataaccattatttcgttattcatgttcccgacgaagttcagcccgaatctatcgatgcatttatttccgtttttattcgctcaagtcgtgctttacaaggctctgttttttcgccattacgcattgaacttagacgttcagaacctgaagatttagaaacattccagaatattttaaaagctccgattgtgtttaatgcacccaaagacatgattgtgtttgatacagcaaccatagaacaaccactagaaggtgcaaatcccactctcacccaagaatatgatgaaattattaatcgttatctggcacggttcgataaagaaaatatattggcacgagtgaaagtaaaattaatcgaaaaattatctacaggcgactttcagcaacaagaaatagcaaaaagtttagggttaagtattcgtagcttgcaaaggaaactctcggcagaaaacacttcatatagtgaactgttagatgacacccgtcatgaactggcactttcttatataaaaaacacaggccatagtgtgactgaaattgcatatattttaggttttacagatgtcagtagttttacacgtgcttttcgacgttggaccgatttatcgcccatccattatcgagaaaaatatctagcttgctcttaacttttaaaaacttagaaaaaaagatgcatatgaatgcatctttttttatgagtaacttactttttagtgagtagttctaacatcgaaactgtagtgaccttggcaccaactggcaaagcttttaagtcaacaatgtagtttggactatgtggaatataaggcacaggtttgccttgtttgactgcatttgcaaacacaactgggtctgctacaccaataaacataaagttaaaaggaatgtctttttggtcgcctaataaatgatgaacatcttctgatcccataaccgcgggatactcagttagaacatgtttatcgcccaatagtgcttttaaaggcccatttaaacgtgccgaaaattctttattgttaactacaggtgtgctcgaacctttaaacgtaaaggtaggtaattgatctttacccatcccctgcatttgggccgcaccttcactcatagacttaatattatttagcatggtttcacgcactttaggatcaaaccagcgcaaattcattttgaccaatgcagtagaaggaatcacgttattcgagtttccagcttggattgagccaatcgataacactgccgcttgttgcggatcaactgcattacccataatggtttgatattgagtcactgcgtttgcagccatgctaatcgggttcttggtgagcattggtaatgaaccatgtccacccacacctttaaataaaacatcaagctgatctgttcctgccatacgtggccccggtgcattgatgacaacgcccacaggtgcaggtgtggtatgtacggcaaagaaataatcaggttttggtaagttgtattttgtccataaaccgtcagtcaccatagctttagcacctgttattggctcttcagcaggctgcgcgactaaaataacagttccgttccattccttttttaaagcgactaatgtttttgccatgctgagcatccatgtcatatgtgcatcatgaccacacatatgtgctacgggcgtttcggttccatcatcaagttttacgcgcactttactcgcgtatggtagaccagttgcctcttcaacagtgttggcatccatatcggcacggtacataaccgttggcccttcaccattttttaaaatgccgaccacgcctgttttggctattcccgttttaacgtcaaaacctagtgacttaagctctttggcaacaatggcagaagtacgcttttccataaacccaagttcagggtgttcatgaatgtctttatagaccttatttaaccactcggtttgcccatcaataatggttaacgctttttgtgaaactacgggtaaatttgttggacttgcttccgcatggagaagagttccataacctgaaatcaaagtcgacaaccctaaaaacataccgtttttaatgattttattcatgtaattaaaaccttataaatgactgatttaattttaaaatttatatccaatttttaagccatagcttactgagtggttatccttaaactcacctacataatagtcactacccgcctgtgcgccaagctgagcttttgcatcgcctaaccagtaatacttcacaccgccagaaataaagtattgcgatgtcgggctatattgagcacccacgcccaagttgtaatatcccttagttgggccacccgttgacactttatcgcctgctcctgagtcccatccaactgacacagaacctaaccattttggcgaaaaacgttgtcctaaacccaaatttaaagaccattggtcgtcataataacgaaccaaattaaaaccttccgggcggcttggcgttgatagtacgccaacaacttttgagatctcaccaaagcgataaggctgtagagcgagatcactccaatttacccagcgtaaactaccaaatagtaacgttccctgacgcagtccagtctggaactccaaattcactgaatcaggagatttaaattttgttgtacctgtatcttcttgttctggcaaattagcaataatctgatttaagtaagctttcttttgtggagtcatctgaccaatagaaatcatgtaatctagatgctgattaactaaatcacgaccttgttgagtgcttaacatatcaattaaaggagcgttttcagtcgcgtttactttatgggtaatggctgaacggtaggttaatgagactttcacagctttttctggaatttggtaagcaagtcctgctaaccaccctaaatcactgacagttttagtatgaaagtcatatccattatagagactaaatacattaccccttaattcaacctgacttttaaaagtttgatagactggccccgcataaagattccagttttttgtgggttggtaacccaaaatgaagcttaaattttgtatatcaaattctgattttgcatttcctgtaggagcatggcccaatgtagcgctggcaagccctgtggttgtaattccaggtaacataacggtatctttaggcgttgcaacgaagccatttacacctgaatattccgtgtcagcaccaaaaggctgatcatataacagaccaaatgaatactgcagtgccaactgtagttttaacgctgccgtaggccgataatcggtattggcgatatctgaaattgaatgatgtgaagggttggtacccgactctacaccacttaaatcggcatctgttattcctaaacttgcttcaaaatagttgcccagttgtaaaaatgccgctacagactgccctgttttatcaaatgcagcagcatgtaatgtgcttgtgcaaatcgatgctattcctaagataaatatttttttattcacaacaaaattcatagatccatcctggatatttttttattttgattcctcactttatgtagatttgaacgattatgcttagctcaaaacgccaataatttgaccgtagatgccatattgaaaagttatagtttgtgtagctacaacatggatattatttttcaatcaccctaaaaacgattgttcttttaaaatgagaagttattttttttaagaactttttgcctgtattgctgttaatattaaaacgcatgatagatttcccaatccttcatatctctataaatcaaggatgatgagcgaatacatttattatggaaatcaagcaaataaagtattttttgacggtcgttgaatcaggcagtattggaaaagctgcccaaaaactcgatgtgggggcttcggcgattagtcagcaaattagtaagctcgaacaagagttaagcattcgcttattacagcgtaatgcttttggtgtgaccccaaccccagcaggtcttgcctttttaaagcactctcaacttattttgcgtcaagtgaacttcgccatagatgctgcacattctgcacgactgtctggacatgtcagccttggttttccaccgaccattaccgctttaattggcatccctttaatgaaattaatgtctgaacgttacccagacattcgtttagagattgtagaaaccctgtcggggaacctgattcagtcgattaattcgcgtcagcttgatatcgccattatttttaccaatgaaattgataaacagtggtcaattcaacccttggtacgcgagcaaatgtatttaatggcacgcaaagaagtgctcgaaaaatacggacttagcgaatgtattaaaagcggaattattcagtcgcagcaaattggcgatattcctttagtgttgccacgtcagcgtcatagcttaagaaaattgcttgagcacaagattgggcagctcaatgtcgtctatgaaattgatggcttgcatttgcttatggacagcctgattcatcttgaccttgcaagtgtgaggcccggtagtgcttgcttacaagagtataaacacaagctgcaattgcttaaggttgtcgaccctgaagttgaacgaattaactatttggtgagccttgccgaagaagaattatcacctgccgcacttgctgccaagtcagccattaaggcatgtgtgaaagagttgattcaaaaccagatttggccatgttctgaaattattttataaagggtcattaatttttctaaatacctaattaattttctcctctcactccctcctgctttttaagattacattttccttcgaatgataagtggttttctgtttatcgaaacatagatgtgtagtttgaactggaaacaaggcatcacattttctacgaaggacacctttaaatctcatctctaacccatttcctatttaggtttattgattgaatcagtttacgtccaaaccttgaagatcgtgaatgtttccattttgttaggccaaggaggtctccaatggatgtcgttaataaccgtagggctacttttaaaaaaatattaaatgtaacgagtggcaactttttagaacagtacgatttttttctttttggtttctatgccacctatatcgcagcaaagtttttccattctgataatgaatatgtctctttaatgatgacatttaccgtgtttgctgcgggttttcttatgcgtcctctcggcgctattttcttgggtgcctatgtcgacaaagtcggtcgtcgtaaaggtttgattgtcactttaagtcttatggcaattggcaccatcttaattacctttgtgccgggttatgaaactattggtattatcgcgccaattttggtggtaattggccgtctattacaaggcttctcggcaggtgttgaatctggcggtgtttcaatttacctcgctgaaattgcaaccgataaaaatcgtggctttattactagctggcagtctggtagccaacaaattgcggttgtgtttgcggccttacttggttattggctcaacaccattttaactcatgctcaagtgggtgaatggggctggcgtattccattcttaattggctgtttaattattcctttaatcttcttgttccgtcgtactttagaggaaactgaagactttaaagcgcaaaaaactcatccatcttcaaaagaaattttcagcacacttgtaagcaactggcgcattgtacttgccggcatgatgatgagtgcgatgactacgacaactttctactttattacggtttacaccacggtgtatgcgaaacgtactttagaaatgtcggtaacagatagccttttagcaaccgtgtttgtgggtttgtcgaatttcttctggttaccaatgggtggcttactttccgacaaaattggccgtcgtccagtattagtgggtattacgactcttgcgatctttaccagctatccagttttaagctggttggtgagcgacattagcttctcaaacctacttattacccttgcttacttctcgttcttctttggtatgtacaacggcactatggtcgcaacacttgccgaagtgatgccaaaacgtgtacgtaccgttggcttctctttagcatttagtcttgcagccgcgatttttggtggtatgactccaatggcttgtaccttccttgtcgaaaatacaggtaatgcaagcacaccagcgttctggctcatgctcgctgcggtatgtagtctcatctcaagcttgtatttatgtcgtggttctaaacaaaaagaccctgacacgattgctgaacctgcaaaggttagcgcttaaaacaactcattccttaacctgaaattttaataaacagtacggctgaccttaaatctccgtactgtgctttcttgcaattcaagtgaggcactatgaaaaagtcccctatcttcataactatttgcctagctggtgcaggcttaggatctacatttgccaatgcagatacgctcgaagtaattagctcaggcggtttctattcatctatggaaaaactcattccaatatttgaaaagcaaactggtcacactgttcacctctcatctggttcgtctatgggggagtcaccgactgcaattccaaatcgactcaatcgtggtgaacgttttgacattgttgtgttggctgctcctgaactaagcaaactcgcagaaaaaggttatgttgacccaaactcacaaagcgctttggtgaattcaagcattggcatggctgtgcctaaaggtgcaccaaagccagacattagctctgcggcaaaatttgaaaaagttttattaaatgccaagcacataggctattctgcaagtgcgagtggtacgcatcttgaaaaagatgttttcccaagctttccacctgtcgaatacaaagtaatttcgagtaaagcagaaaaagtggtaggcgaccgcgttgcaaaacgtattgccgaaggccagtttgatattggtttccagcaaattagtgaaatcaaaccttttaccggcaaatatggtcaagttgagttagttggtccaatccctgcgccttaccaaaaagttaccgtatttgctgctggtattggtaaaaactcggaacatgcaaaagtcgcaaaagagttaattaaatttgtgaaatcgcctcaagcgacacaaattattgaagaacagggtcttgagcaggttaaagaataaaagctctaaaaggcaacattttgaggtgatgttgccttttctcttttagtggtttactcaaagcaatagaacaaaatctatagcgataaaccagtgtagaattaatccataaaggtcaaagtagaatttgccgtggaacttaaacaattaaagtattttattgcagtgatcgagtcaggaagcttgggtaaagctgcaaaaaatctcgatattggaacgtctgcattaagtcagcaaatttcaaaattagaaagcgagctttctattcgccttttacaacgtactgctttgggtacggttcccacccctgcgggtttagctttttttcaacaggttcaactggcacttagacacctagaccatgccatagactctgcgcactcctcacgtttaagtggccacgtcaccgtcggtttttcaccgagtgttgcagctgttattggcacacactttttaaaactgatgagaaaccgttaccccgacattaaagtccgtttaatcgaaggcttatcgggtgacctcaaagctttagttaatgcaagacagctcgatgtggctatcatctttagtgatgatgtcgacccacagtgggccatacaacctttagtcaaagaacagatgtttttaatctcgcctaaagaagtactgggtcagtaccatcttgaaagctgtatcgacactcaaaccattactcatttacagcttaaagaacttcccctaattttaccgagccaacgacatgggctgcgcttgttgcttgaacagaaaattcatcaacttaaagtggcatatgaaattgatgggctgcatttgttaatggaaagtattagccaactcgaaatggcaaccattcaacctgcgggtgcatcgttaaactcgcggcaagacctgtgtttactgcgcgttgtagaacctgctattgaacgcattaactatttaattagtctctctgaagaagaactctcgcctgctactttagccaccaaagtagtaattcgtgcctgtatcactaacctgattaatgaaaagcgctggtctggtgcggaactcataaacacttaagccattagtgtttatttttactaaacacccattcaagcctagcctctcacttcatcttcccttttgaagctacattagccctagctgagaaagggagaaatccatgcatgatgtaattgtgattggtggtgggaatgccgcactgtgtgccgcgctcacagcaaaagaaagtggtgcttctgtactggtaatagaggcagcgcccaaagagtggcgtggtggtaactcacaacacactcgtaacctccgttgcatgcatgatgctcctcaagatgtattagtcgatgcctaccctgaagaagaatattggcaagacctacttaaagtgactgcgggcaaaaccaatgagcacttagctcgtctagtgattcgtagcacggcgacctgtcgtgactggatgcgtaaacatggtgtgaattttcagccgccgctctcaggtgccttacatgttgcacgtaccaatgccttttttatggggggcggtaaagccctcattaatgcgtattaccgaagtgcccaagaacttggcatcgaaattttatacaacacaaaaattaaagacctaaagttaaaccaaggatattttgaagctgcaattgcggaagatggccgtgtatttaaagcgaaaagctgtgtattggccgcaggtggttttgagtcaaatttggaatggttaagagaagcatggggacaaaatgaaaacggcgaatggcctgccgataatttcattattcgtggtacccgttttaatcagggcaacttactcaaatttatgatagatcaaggcgccgatattattggtgacccatcacaatcacattgcgtcgccgtagatgcacgcgcaccgttatatgacggcggtatttgtactcgtattgactgcgtttccttggggattgtggtcaataacaaagctgaacgtttttacgatgaaggcgaagacttctggccaaaacgttatgcgatttggggccgtcttgttgccaaacagccacagcaaattgcctattcgattatcgactcaaaagccattggtcgctttatgccccctgtgtttgcgggtgtaaaagcaaatagcattcaagagttagccgaaaaaatcgggctggatgcaaaaaccttataccataccgtagaagaatttaatcaagcctgtgtgcaaggcacctttaaccataccgttttagatgactgcaccaccgaaaatattgttcccaacaaaactcattgggccgttcctctcgaccaaccacccttctatgcctatgcgcttaaacccggcattacctttacctatttaggcttaaaagtcgaagacgatgctgcggtacgttttaacaataaaccaagccgtaacctgtttgtcgcaggtgaaatgatggcaggtaatgtactcggtcagggttataccgcgggcgtgggtatgtcgattggcacgacctttggacgcattgccggaaaaaatgcagcccactatgcactttcacaaggagttgaacatgaatgctagtaccaaagccctaattccagttgttcagctctcagaccacgagcaagaagtccaaagagccctacagatttgtaatgcttgtcgttactgtgagtcattttgtgctgtatttgctgccatgaccaaacgtcttgagtttaaccaagccgatattcattacctcgcaaacctctgtcataactgtggtgcgtgtttacacgcttgccaatatgccccgccacatgagtttggtgtaaatattccaaaagcgatggcgcaagtacgtttagaaacttaccaagagtttgcgacccctcagcctttaggtcaactttataagtctgtaggtattccttttgtttcgacgttaacactcattttctttttttgcatgttagctgtagtgtggtggaaaggcactgacttatttgcaggctatcaaggtaatttttatgcgattttcccgcataactttttagcactactgtttggagcgacctttacagttgcaattgttttactcggcattggaattagcaaattttggcgccagacgtctaaagttattcatggcaaagttgagaaaccagacttagttcaagccacccaaaatgtattaacgcttaaatatttagatggtggacatggcaaaggctgtaatgagcaagatgaccgttacacacaaatccgccgtgtgttccatcacctgacgttttatggctttatgctctgctttgcagctacaggtgtagcgactttatatcactattttcttgacctacatgcgccttaccctatctttagcttgcctgtgattttgggtactttgggtggaattggcttagttgtcgggcctgctggcttactctatttaaatcttaaacgtcatccgttgcatggtgaccgtgagcaaaaacctgtagatcgaggctttattttccttctacttattgttagcgcttcagggctagtacttatggcatttcgtaataccccttacatggcacttttactgattttccatttagctacagtcatgacattctttattaccatgccatttggaaagttcgcacatggtttttaccgcagtgcttctttactcaaattcgccatcgaagagcgtatttcgaagaagtcataatgttcaggattagaaaaacttcctaataagaaaccgctataaaagcggttttttatattcaactacaatgataattgaatggccatattgaaaacggtaatagcttaagcaatcttcccatcaataatgcctttctcttttaacgtagccagctcctctgctgttttaaatctcgataagatttgagtagtatgttcacctagctccggcggtgcatgacgatattcaacgggagtatcagacagtttgattggtgagccaatggtttggaagttttcatttaaacgatgaggaatgttcaccaccaaattgcgatgcacaatttgtggttcagctaaagcatcttcaatagagttgataacacctacgggtacttttaaggcatgaatcatgtcgacccattctttagcagtttttcgcaaaaagtgttccgacaataaaggtatcagttcatttcgatattttacgcggtcttggttgcgcacaaacttttcattttcgagcaactctggataaccaatcgcaatacacaaatctttaaactgtttgtcgttgccacaagcaataataaattctttatctttagccttaaaagtttgatacggcacaatacttgggtgttgattacccatgcgttgtggcgctttacccgaagctaaataattcattccctgatttgccagtgccgcgacctgtacatcaaggagtgacatatcaatatactgaccacgccctgtgtgtgaacgtgcaatcaaggcagcttgaatggcaatggttgaatataaaccagtttgaatatctaccacagccactccaactttttgtgcaccaccacctgttacatcatcaggttcgccagtaatgctcattaagccagacataccctgaataataaaatcataaccgggttcttctgcacgtgggccatcttgcccaaaaccggtaatcgagcaataaacaatgttcgggttcaactcacttaatgacgcgtagtccaaaccatatttagccaaagaccctgtcttataattttcaatcacgacatctgcagtcttggcaatttcataaattaaggcctgaccttctggtgtggtaatgtccactgcaaccgaatatttattgcggttggtacactggaaataaccagattcacgggtcatgtttccatcttgatcgggcatccaaggtggcccccacatacgggtgtcatcaccgactcgaggacgttcaattttaatcacttccgcgccaaggtctgccaagatttgcccacaccaaggccctgcaagcacacgacttaaatctaaaacccgaattccttgtaatgcacccataacgatacccttatctttttagaaggtgctcaacgcacctccctgtcattgtttatgattgtctttgtggatcgtactgacgatctttaataaataagccaggcaatacacccgcaacaaaatacgcagcgcccatcacaataaaggccatggtaaacgtaccgcccgatgccaagaaaccaatgatagctggtgcaatagcggctccgacacgaccaatgttataggcaccgccaatggctgttccgcgcacgtcggttgaaaaactttcagccatataggtcgcgtttacaccatatggaatgccatataagaagccaaaagtgatcaataaatacaaaatattgtcaggagtattgaagaaaataatgattggcaaaaacacagcactggcaattgtgccaaatacaaaaacagcacggcggttaaacttgtctgcaagatagcccgctaaaatttttcctaaaatcattgcggtatatgaacccaccatataactggttaagtttttaaagttcatatgcacttctgtttctaaataacttggcatccagttgttaatgccgtaataaccaaactgtaagaagaatgctgtggtcatccacaacaaaaacattttacggtgcttaaagttattaaagatttgtttgtagatactgctactttttggcttttcagccaccactctttctttaggctgtctgttgccttgtaagctttcaattttggtgagctgccaagattttggctccggcacaaatcgttgcaggaaaatattaacgaaagcaggtactacggtcaggaagaataaaacgcgccagccataatctggaataattgcgccagctaataacgttgcagcaatataacctacagtctggcccgtctgtaacgtgcccaagaccgttgtacggtaagtggttggcacatattcagccattaaggtattacacgccatatagagtgctccgattcctaaagcacctataaaacgtagagccataaattgctcgaagctttgcgtaaagcctaacaaacaagtcgctacagaaaagaaagtcaccgagttggcaatggtccgtacgcgaccaaacttgtcacatgcccagccacccaaaataccgccaatccccatacctgctaaagaagcactgcctaaggcacccgcttgaaaggtagttaacccaaactctgcctttaaactggtcaagctataagacagcagcataatatcaatgccatcgaccaccatcgcaaaataggcaaataacaacgcccatttccatgtatgaggtccaatcctttcgtatgttccaaggttacttggaaatgtatttcttaattctttcgatattacttgaacgtcattgttcatctttagttcctcattttcccaaatgagtcatcggtagcttacttatgttttctgtatgacttaatcttctatattttcatcatcttacatttggttttaagtacacagagacacatcttcacatgagtatccttacgatgaatcttgtcattttccataaatttttgcgtaaaaatccctaaaggtgctcccgaaagaacacctctatttttaaaaatgagtgtgttagttactaaatgcggcaataccagtttgtgcacgacctaaaatcaaggcatgaacgtcatgtgtaccctcgtaggtatttacgacttcaagattgaccaaatggcgtgccacaccaaactcgtcactaatgccgtttccacccatcatgtcacgtgccatgcgggcaatatcaagcgcctttccacagttgttacgcttaattagagatgtaccctcaactgatgcaatgccttcatctttcatgcggccaaaacgtaaagctgcctgtaaacccaaagcaatttcagtttgcatatctgccagcttcttttgaatcaattgatttgcagccaacgggcgaccaaattgtttgcggtccatggtgtattgatgtgctgtatgccaacagaactcggcagcacccattgcaccccatgcaatgccataacgagcactgtttagacaggtaaatgggccttttaagcctcgaatttcagggaatgcattttcttcaggtacaaaaacgttatccatcacgatttcacccgtaatcgaggcacgtaaaccgaccttgccatgaatagctggcgcagataggccttcccagcccttttctaaaatgaagccgcgaatgtcacccacattaccttcagcagaaacttcttttgcccagaccacaaatacatctgcaattggactattggtaatccacatttttgcgccagtcaaacggtaaccaccatcaacttttttagcacgtgtaatcatactgcccggatctgaaccatgatcaggttcggtcaaaccaaaacaaccaatgtattcaccagtagccagtttaggtaagtacttctgcttttgctcttcggtaccaaattcatgaatcggaaccatcaccaatgagctttgcacgctcgccatagagcggtagcccgagtcgacatattcaatttcacgcgcaaccaaaccgtaactcacatagttcaaacctgcgccaccatattgctcaggaatggttggccccagtaagccaagctctcccatttcacggaaaatagatggatctgttgtttcatgacggaattgttcaagtacacggggttgcaaacgttcttgacaataggcatgagccgcatcacgaatcatgcgctcatctgggctaagctgttgctcaattaaaaatgggtcttgccagttaaattgaacttttgctttttttgttgtcaccatgtgattcatcgcatcctctgcttgatttgatcttctttatttaactcgatgttatgcgtgaaaaatgcagtaatcaaacgataaatgttcatgcagatatgcgacttacgcatatttaaaatgggtcgcattaaatttaactatttaattcgttgtatttcattaaaaatgacttatttttatactaaactcggatatctgcatttaggtcatatgttgttttgaaatatgatggcaaataaaaggatttatttatgcgaaaaagtatcccgtccattcagggtctaatttgctttgaaagtgcagcaaaacatctaagttatacctatgctgcgcaagagttatgtattacccaaagtgcagtttctcgccaaattcaacaattagaagatttcttaggcgttgaactctttatacgtactcggcatggtgtcgaactcaccattgctggtcagcagtattttaaaagtattaagccctacttattaggtttagagaaatgtacagccgatgtgatttctcataagggtttaggtggaacattaaagttaggtgtggttcctacctttgcaacgcgatggttattacccaaactccatcttttaaatcaaaaacaccctgaaattacggttcatttagaaaccagtactaaaccttttttatttaatgacaacatttttgatgctgcgatttttgcaggtacgcaacagcaaattgaccactggcccggcatacaagcacattatttaatggatgaagaaattgtacctgtgtgctcaccaagactaatcgaaaagtattttccagatgctgtgatgattaatgaaaatacctatgatttaagcccagaagatttattaaaaatccctctactacaacaaaccactcgacctagcatttggcaagaatggtttctaactcatcagatgcaacaccctaagccttttgatggacagcgccatgagttattttcgatgcttgccgttgctgccagtcatgacatgggaatggctttaattccacaaatgttgattgagtctgaactacaaaaaaaagaactagtaattgtttccaataaaaaactaaaaggcagccggaagtactatctcattcattcgagccaagacatctcaccgactattcaaaaatttgttgagtggatttaccaagaactagaacaactaaagaccaataccaattagctgagcagccctgatttatgccaaatattgcgatctataaccataaaaaagattgtgattaatcaaatcacaatctttttagttaagcgtaaatgactttgaaattaatgactcattaattgaatatctgaaccgctacgtttcgggtcaatcaagattttggcatgctgttcaggatcacgtaatgcttcaaatgcattagttacaccttctaggccaacaacacccgtaatgagcggtgaacagttcactttcccttctgcaatcatgtgtagcgcatctctaaactcaagcggtgtatagcccaacacaaactgaatttctaactctttattaattgcaagtgcgggttctattttatcactttgcatgcacacgcccaccccaacaattcgggaaaacaaaggtgcaccttcaataatttgctgcaaaacacccggtacgcctacacactcaaaaataacaggacgttttggtagagcgcctaatttgtcaatcatgcgccatccatgccaccacggtaagcgtgtcgcttgcaacttatcaaatagtcccatacccatgttaattgcatctgatacattgccaagcaaaccaaattctttccagttggcaaatggtgatgtctctttagggtctaccacaatatcggcaccacattgctcggcaagcttacgtcggtttggagaaaagtcactggcaactacggttttaaccccagcagctttaagcattaatatgacacctagcccgacaggaccacagccaatcacaatcgcaggttcacttgtttttacacggctacggcgaacagcatgcaatgcaaccgccataggttcggtcatggcagcactatccgcatctagaccattcggtacttcaaacatcaagcttgattgagccaatacttgctcggcatagccacccgaagcatttggggaaagccctgtagacaaataaccatgctgatctacatttaaaagcggcattgcgcaaacgagtgtatccgctttaaatttatggcgtgtttttggaccgtagtctaaaaccttgccgcaaaactcatgtccaagtacaaatgggtctgtagacttcgctaaaccattaaacccgacacgtgcagccaaatcatgcatgtggtcgcagtgatgctgcatatgtaaatctgaaccacagatcccacatcgcaccacttccaataaaacttgtccttttgcaggtgttaagttcggttggtccactacttgcaatgttgcttgatgacaaagtaccgacttcatttgagtgcttcctatttcttctttttcatttacttgccagaaatagatttctacagataaattaatcgctttatcggtttggtctttagcaagcctttattcatctttacaagtaaaaggcaaaataccaatgaccattcttcagccaatccactcttaaagagtcaacacaaaaaggctcagcgaaattaaaaacaataaaaatcttggtgcttgtatcttacacagactgtgttgtcttcttaggccagaacaatgtcatcaaaattaaaacttatacaaatatagtaatttcaaaaaactcaactcaaccattttcacaaaaacatagcaaatccaaacttttatcagtgcatctaaacaggcatgatgaattgatgcaaacagataagaagaaatttatgattactaaaacgctcccgcttacagatatacaccgccaccttgatggcaacatccgcattcaaaccattttagagttggggcaacaatacaatttagatttgcctgcttacgacatagaatctttacgaccacacgtacaagtgatggataaccaacccgacttattaagttttttatctaagctcgattggggcgtaaaagtattagccagtttagatgcctgtaaacgtattgcttttgaaaacatgcaggatgcagcacagcaaggactagactatgtagaactacgtttttcaccgggttatatgggaatgacccatcaacttccacttgaaggcgtagttgaagctgtgattgctggaataaaagaaggtagtcaggcgtacggcgtaaaagcgaatttaattggtattatgagtcgtacttttggtcaagaagcctgcgaaaaagaattaaatgccctccttgcccataaaaacgatattaaagcactggatcttgctggagatgagcttggttttccgggcaatttatttattgatcactttaaaaaagcacgtgatgcaggttggcacattaccgtacatgcaggcgaagctgctggcccagaaagtatttggcaagccattgaagaattaggtgcagaacggattggacatggtgttaaagcagttcaagatttaaaacttctagattatttggctaaacaccagattgggattgaatcttgtctcacctcaaatattcaaaccaacacagtgccttctttagcagagcatccattaaagacttttttagaacatggagtgcttgctaccattaatacggatgacccagcagtagaaggcattgagatacagcatgaatatttaactgctgccccattggcaggtttaagtcctgagcaaatttatacagctcaagaaaatggacttaaaatcgcatttttatcacatcaagaaaaagatgagttaagacagaaatatcaataacagagaacagagaacagagaacagagaacagagaacagagaacagagaacagagaacagagaacagagaacagagcttatataaataagttcagatattggagcaatttggaattaaaattttattatagaaaacaaaaaaattccttctatccataagataagaagaaatgattttaatatatgggatattttagaaagcttgaacgcttttaaatatggtcggagcagtaggattcgaacctacgaccccctggtcccaaaccaggtgcactaccaggctgtgctatgctccgaaattggggtgaatgacgggattcgaacccgcgacaactggaatcacaatccagggctctaccaactgagctacatccaccatcaaataagttctacgtaccaagctaccaaatggcgcgcctgacaggattcgaacctgtgaccatccgcttagaaggcggatgctctatccaactgagctacaggcgcttaaccgatgatgcttatcatgcgatacttcgccgatcttaaaatattcttttaagtggtcggagcagtaggattcgaacctacgaccccctggtcccaaaccaggtgcactaccaggctgtgctatgctccgatctatctcagcttttgctgtatcgcacatcgtgcggtacggtgtgcattctaggcgcgacgccctcagacgtcaacacctattgtcaaaaaaagttaaaaatccttatcaaatgtatatttaacaagcattttgaggctttttaacgttttaatgatgcactaaaggctaacattcgatctaaaggcattttggcacgttcagcaagtgctgggtcaacgtgtatttcttgatcacctttttgtaaaacttctaaaattccatcaagttcattcatggccatccatggacaatgtgcacatgaacgacaagttgcgccctcacccgctgttggggcttcaaccagaatcttatctggtactgcttgctgcattttgtagaaaatgccacggtccgttgccacgattaaacgttggtgtggcaaagtttgagcagctttaatcaattgagatgtactacctaccgcatcggcaatttctaccaccgactctggtgactcaggatgcaccaatacagccgcatctgggtacagtgctttcatgttagcaatgccacgtgcacggaattcttcatgcacaatacatgcgccatcccaaagcaacatatcagcgccggttttcttttgaatataacgacctaagtgctgatctggtgcccaaataattttttcacccaagctatctaggtgctcaacaatttcaactgcacagcttgaagtcaccacccaatccgcacgagctttaacagcagccgatgtattggcataaactactacagtgtggtcagggtgctgatcacaaaatgccgtgaactcatcgactggacaacctaagtcaagtgaacaggttgcctcaagtgtcggcatcagaattgttttttcaggagacagaatttttgctgtttcacccataaacttaacgccagccacaaccagtgtagaggctgcatgatctcgtccaaaacgggccatttctaaagagtcagaaacgcatccacctgttttttcggcaagttcttgtacatctggatcgcaatagtagtgagcaacaaggacagcatcacgttttttgagctctgcttcgatctgtgcaaacttttgttgttttgcttcttcacttaggcggttgtcttttggttcacctaaacggtctaaatgcgcttgtacaatgttttttgcatcgttggcaattaaagtcgcatcactcataaaacgtcttctctatccttcatgctggcatacctgctcgcatataacgttactgcttaaacgatttactaaattcaatcatttaatatcaaaagatggggctaataaaaaagcctctttgtcgaggcttgattataactgaatatttacgaacggtaatctgcattaatcttgacatagtcgtaagataagtcacacgtatataccgtgtctttggcttgtccgcggcctaagtcaacacgaatggtaatttcggtttgtgccattacacgagcacctgcttcttcggtatagtcctcggctgcgccaccatctttacagatttgcacgtcgtctaaccatacctgaattttagacacgtctaagtctttcactccagcatagccgattgcagctaaaatacgaccccagttcggatcagatgcaaaaagtgcagttttaacaagtggtgaatgcgcaatactataagcaatgtcacaacattcttgagtatttgcaccaccttcaacagcaacagtaataaacttggttgcaccttctccatcacggacaattaactgtgctaaacggttcattacacgagcaagtacttctaacactttagcgtagcgtacatcgctttccgatgtaatttcagcaccaccagcctgaccagttgccacaaaaatacaagagtcatttgttgaggtatcaccatcaatggtaatacggttaaatgaatgctcaactgtagtctttaatagcttttgtactaaatcacggcgaataggcgcatctgttgccacaaagctcagcatagttgccatgtttggacggatcatcccagcgcctttactaataccggtcatggtataagtcataccatcaagctcaaattgttcagatgcgccttttggcactgtgtctgttgtcataatgccagatgccgcatcactccatgcagcgtcttgtacgctatttaatgcaggttgtaagccagcgagtaaacgttccatcggaagctgctcaccaatcacgcctgttgaaaatggaagtacttcgaaactgttaacgccagcaagctccgctaactttgcacaagtatcctgagcatttttcaaacctgtaggaccagtaccagcattggcattacctgtattaatcactaaatagcgcggattgccttcggcaagatgagctttagatacatgaacaggtgccgcacagaatgcattttgcgtaaatacacctgcaacatttgaaccttctgcaaattcaaaaatgactagatctcgtcggtttgggtaacgtacatatgcttctgttgagccaatttttacaccttttaccacatgcatttgtggcattgttacgtcaccgacagccatttttaaaacatccagagtttgttatgaaaagattaatatttcagaaaatagcgaggttataaaacacgctttatatgaaatatcagaattgacagcttattagaaaagcctgaaaaaatcgagcgctaaaaatagcttatttttgctctaatcttaataaaatatctttcttatcaagaccaccggcaaaaccaaccaaagctccgcccgcaccaattactcggtgacaaggtgcaataattgaaatcggatttttgccatttgcagcacccactgctcgcactgctttttcatttccgatctgaacggcaatatctttataacttcttgtttcaccatacggaatcgtaagtaatgccgtccagacctgcttttgaaatgcagttccttcgaaatctagtggcaatgtaaattcacggcgtttgccttcaaaatattcttgtaattgttgttcggtctttaataaaactggatgctcaagttgttcgaccagctctgccagtcgaacacgttttggattttcattgtcccaaagtactgccaccaaagcattttcattcgcaaccagctttaattgcccaacaggcgaattgatatacttataagacagcaacatacttgatcctcttaggatggagacgaaattttcattagaaccagtccagatacaatcagtacagcggcaatcattctcatcgcaccaataggctcatgaagaaagaaaataccaactaaaaatgatccaattgcaccaatgcctgtccaaaccgtataagcagtaccaaggggtaaagttttcattgaaattgaaagtagaactacactcaaaatcataaaaactacggtaataatactaggtgttaagcgtgtaaaaccttcagacattttcatagaatatgcccaaatcacttcaaatacacctgctaaaattaaaatagcccaagccataacattcactaatttttatagtgtcaggtcgtcccgacatgattacccattatgggggaggtcgttcctcctttatgtgaggactcagtttactttaaaataaaaaatgaaggcaaacccgaactcaagcttgcctctatcagaaaatattattcattttttaactgtaaaatttttcgtgcaccatttaaaacgaacaaaacaataatcaatccaataattaaatcaggataacgagagcctgtgattgcaaccagtattcccgcaataatgacacctaagtttacgatgacatcatttgcagaaaatatataactcgccttcatatgtgccccgctctctttatggtcactcattaagtaaagacaactaatgttggccgcaagcgctaatcccccaattaaaatcattaaaattgaaactggttcactgccatatataaaacggcgcagcacatcaattaaaacgattatggctaaaccaaactgcaaccaacccgaaagatgtgcagcctttaattgagcgtcgaggtttttacccaccacgaataatgcaataccataaattgcagcatcggcaaacatatcgagcgagtcagcaattaaccctgtggaggaggcaatgatgcctgccattaactcaatgacaaacatgaccccattaatcagtaacagccattgtagtacctgtttttgtgctgcattagttgaggaacttggtcgaacctttttgggtttttcaataggctcataatgtggttgggtttgttgtaattcggctcctaaacctagacgttgcaggcactgcgtaatcttttcatcttgagtactgtgatacaccgctaagtggcgggcgggcaaatcaaaataaagttcttgaatatgctcagcataagaagctaaagccattcttaccatttgttcttcggctgcacaatccatacggggaatatgataataactcacccattgggttttatttaccctaggttcacttgccacagaaaagtcctgagctgctacatttgagcacccacagctagaacagcttttatttacatttatttgattctcttgtttttctaaagccatctttgcaccataactgacacaaaaaacaatgccatcagtataaaccaatggcatgtcattaagcttactttttgttcggcaattagaattttagtgttaacccagctccataataccaaccatgttctgagtcggttccagtttgccaagcggtttgttttaaacctttttcataaccataaccgacatcaacaaatggcatgacctttttattgatttcataacgggtttgaaagccagcttgtaaactcgacaggcctgttttactggcatagcgagattcatcttgtaaaacaacatctgcttttaaatagggcttaccaatcaacttttgagtaaaaagcaaatctctttctgtctctaggcttaacttccataacttatcttcacctacataaagataagcatcggtttcaaaaaagtaaggcgccatgccatgtaagcccactacaccagcccagcgatcttccttttcgtcttcccgttgtaaacgttcatagtttaccccggcctgtacatcccaatagtcagctacattgcggctataaagtaatgaaccgccataattggcatcttctgactctgctttttcaacgtgggctttaatgaacaatttattttcatccgttcccacccagctttccaattcagaagaaaaactgctttcaccctcttcattttgagtccagccagtatcaatctttgttgcttgataaacctgtccaccatgttcgcgtaaatgatcgtgtgttaaaggttcttgagcaaaagcaaatacagatatacccgagaaagcaccgcaacatatcatttgagaaaataacttagtgatgcgcatgactagctcctttctcattttcagattgaacagttggctgggactgagcgggttgttgtccatcgttgacttgagcaacaattaatttattcatcattccagcactcatgtgatagagcagatggcaatgaatcgcccattctcccaaagcatcggctgtcaataacgccgtaacggtctttccgggtggaacaataatagtatgtttatttggtaaattttcagcttgttgaccattttccaattgcataaacatgccatgtaaatgcattggatgagccatcatactgtcattcacaaacttcaagcgtatgcgttcaccatacttaacttgtaaaggtatcgtgtcactaaatttcttgccattaatggtccagatataacgctccatgttgccacctaaacgaatgactaattctcgttcgggcgcacgggtatctggctgaggtgttaaagattgcaaatcgctatattgcagtgctttcatacccgctggcgttgaagcatttgcccagccataaactggttcatcctttttagacttattctcagattgagcaggcatctcatgattcatattcatcatagtgtggtcatgctcgctagatgacattgcctgcatatcatgcttcatttcagacatcgctgacatatcatgcttcatgtgcatcatggaatgatcatgttcgccagatgacatatttttcatgtcatgatccattttcatcactgtgtgatcatgattagcctgactcgtctcttttttcatttcaggcatggccgacatgtcatgttgcatgttcatttgatggccagcatgttcattacttccatcaccatgactcatgcccatatcatccatggtcaataaagcacgtgggcgtggtattggcatttggactggccccacagcctgcgtattttcattgtgcaaagtaccgatagcaaaaccactacggtcaatagactctgcttcaatctgataatttggctgtttaggttccacaatgacatcgtaggtttcagctgtaccaatacgaaactcatcaattgctacaggtttaactggctgcccatctgcacttacaactgtcattttcaaatttggaattctgacatcaaaaaatgacattgctgatgcattaataaatcgcaatcgaaccttatcaccagctttaaaattagctgtccagttttgctgaggagtcttgccgttgactaagaaggtatagcccgtcacatcagacatatcggtttttaacatccgcatctgattccacatcgaacgatcttgccaagttgcttttaagccctgtgctttaacttgcttccatacatcagatacagtttcacggcggttttgataatactcagcagattttttcaaattcttcataatgctatcgctagaagaatcatggaaatctgaaagcatcactacataatcacgatcagttttttcatgcgccgcaactggtattttgccttttgggtaaatcacaagcggcccatataaaccgtcttgctcttggcctttactatgggcgtgataccaatatgtgccattttgtttcaccttaaagcggtaaacaaaatctccatttggagcaatccctttaaaattattaaaacccggcacaccatccattaaccctggcagtaacaacccatgccagtgtaaagaggtatcttgattctttaattgattatggacgcgaataacagcctcatccccctcttcaaactcaaggagtggtgctgtaaattttccatttacggtaattcgtttaaggggtttgcccgtaacattgacttgttgttcattaatattaaggtgatattccttaattgccgcgagagtccatggtgaaaccaatagaccaaatacagcgacgaggctgctaatcgttttatgagacattgctttaatccttttaactaaaaaaataagtaagaaaggattaagcttttggtggacgtaagatttcttgccagtatccggctaaatgctgtgcctgataaatactactaaattgagatggaataggaataaatgatgattcaatatctggtatagcttgctgtaaagccagatttaccatctgacaatggaccgggttacagtcttggcagtgtttaccatgttggtgagaaacctgactcatagattgatgacacgttgcctgctcatcagcttgaatatgcatagagtgatgtttcatttgctcactatgacacggcatagtatgaagatcatgctgcataggtgtctgagcaatagacacaccactccacccaataactaaagtcatcaggaacacaaaccaagcatacttgcgtaagtgttgcagtgtcatcatttattgccttgagcaatctatttatcttagttgtattagcataaccaagtttttaaacagatacaattttccatcttagttgattgttgttaaggtcattaagcaaatggaggctgatgctgaagaactaagtcaatcacctgtaatgcaccttcttgctcattatttgcagttgtgtaaggagcaacggcttttaaggcttcaactgcattttcgactgcaaacccataacctgctgctttaatcatctggatatcattattgttatcaccaatcgcaacgacttgatcgggttgaacctgccatttttgcaataatagcttcaaaccatgtgctttgtgctggtccggaagaatcaaatcgataaaattaaagccacttgagactggtaccaaaaccttatcttttacaaaactttgcttctgaaaatgctcaaaaattgtaaaactttcattttcctgcgcagtaaaagtaattttacacaccaagtcatctagtgcataaaagtcatctataaccgtcagcttttcaaaatagcgagcgactttagcataatcttccgcgttcatactgctatgcacataagcactctgttttccgcagatcaccattttagaggtatacactgggtcaatcgcatttaaaatctcaacgaattgctctttgcttaaatgagcaaaagctaactcttgccccgcatctacaacatgagcaccattttcggcaataaaagcaatctcatgattaatttctggaaaatacgtaacaagctttgcaagctgattaccactagcgactacaaaacggatattattttgttttagttgttcatactgttttaaaaaacgtgctttgttgtactgcttcttagaattaagaaaagtcccatccatatctaccgctaaaatttttactgtcattaatgatctaggtctcttactaaaatcttattaaatcaaatttagctttatttttcatgacacttttacagttttctattcaatatattttaaaaagttttacacaagccctctcgttttttgcacaggttattttttagcaaagcttaataaaaaaacagatcccaaaatatcccgatagaatagaaaaagaacgccaaagcgttcttttttcatacattttgcttagagaataaacggttgatctcattttgtttattttaccaacatcttatccatatggttatcaacacagttatccatacagttataaacaaagttatccacaagtttactctcagcctaatattctttttttaagcgtctacactaccgacttttgcaagctctgcacgcatttgatcaatcacaactttataatctggttgaccaaaaattgccgagccagcaacgaacatatcagcaccagcttctgcaatttcacggatatttgcaggaccaactccaccgtctacttctaaacggatatcacggccacttgcatcaataattttacgcgcttcacgtaatttttctaaagtcattggaatgaacttttggccaccaaaacctgggtttacactcattaataaaatttggtcaactttatcaagaacatagtctagataatgcaatggtgttgctgggttaaaaactaatcctgctttagcaccaccagacttaataagctgtaatgaacggtcaatgtgatgagaagcttctgggtgaaacgtaatgatatctgcgcctgcttctaggaaatcaccaataatacggtcaactggagataccattaaatgcacatcaacaggagcagtaattccataattttttaaagccttacacacacctgcaccaaaagttaaatttggaacatagtgattatccatcacatcaaaatgcactacatcggcaccagcagctaacactttgtctacatcttcgcctaaacgagcaaaatcggcagataaaatagaaggagcaatcaaataaggcttggacataggtggatgacctggctaaaaatttaaggagaggctaaaaattataacaaaaaagaacctacttggcccgctcttccttgcttaaatgacaacatttcaaacttgcaacgtaacgttgctactatagaatgccaagtgccaaacgaatttgttaaggtacattaaaccaatgtgaggattgataatgaaaagcacaactcatctattaacaaatgatggaaaacgcattgcaaaacgtctagttaatcattggaaacataagtttgaagtacaagaaactgaacaagattttaaaatcttaatgcctaccgcaaccattacgcttgcaccagaaacagagcagttaaatgttgctattgatagtcagttagatgaccacaaccacttagaaaaagttgttcttgatcatctaaaccgcatggctcaacaagaatttcaagttgaatggcaacactaaattaattaaccagataccttttctaactggattgcatggaactgcaaatgctcatccataaaagtctggataaaataatagccatgatcatagccagcatgttgtcttaaagttaaaggctgtcctgcctttaaacatgcttgcttaaatttttcagggtgaagttgttcataaaattggtcatctaacccctgatccaccaaaatttcattaaataccgcaccattttttgagactaaagccgtggcatcatgagccaaccagctctcacgatctgtacctaaataatggctaaatgctttttcaccccatgcacattcagttggcgcgcaaatcggtgcaaatgcagacactgacttaaacttctcaggatatttaaaagctaaagttaaggcgccatgtccccccatcgaatgtccaaaaataccgacttgttgagcattgactggaaaactttttaaaataagtggatataactcatcgattaaatagctttccatctgataatgctcagaccaaggcgcttgcgtcgcattaatataaaagcctgcgccttgacctaaatcccaattgtcacctactgcaacttgttcaccacgaggtgaagtatcaggtgtaatcagtataagactaagctgggcagccatatgctgtgcatgtgccttaatggcaaaagtttcttcagtacatgttaaacccgctaagtaaaacaaagttgagcaaggtttgccttctaaagcagcaggtgacaaatacaccccaaacttagtagagccttttaataattgagaatcaaactgataaatgcgctgctcaccttcaaagcagcggtttttttgcaggagttgcatcgtttttagcctctgtttgtgtctgagcaatatttacactacctgtatttggttgaggaaaaagatatttttccaactgaggtagcataagttccatattcttaccaatcatccattgtggctctgaaggttctacaccttgagctacttcccatttggttacggtttgcttagcagcattaaacgaatctttcatagaagactgctctcgcatcgccaaatcaaagaaagctcgtccaaaataagtataatcagcttcgttattacaaccgaacgaagttttatccgcagcagatgccgtaataattaaagtatcaggtgactgtaacgccggaataaaacttcctgagtaacaagcagaaatgacaatcacacgccaacgtatccccgctttatcgagcgtttcacgtaaccatttcggatcgacttgccccaaatctagaggtgcattttcaatttcaaaatggttttgttcaccgtgcgatgtcatatataaaaataacacatcactatcacggttcatttgctggcccatacggcgtaaggccaactctatactggttttagatgcaatcgggatttcagttcgggtatccggattattgaccagcatcattgaacgcccgactgtaccaaaacgcgtatcaaattgttctttaatacgaaccacttccgatttaaaaacgtcttgataactatcgcctgcaacacccaagaaataccaatgacttttagctaactcaccatattgaacttgctctaaagcatcatgaagtaatttactttgtgcataaaaagcatcttcggcaaaagtaggtggagaatcttccactttccaaataggctgatcttttactgaaagttgccaaaccaccatggtcgcaatggtcgcaaccataaccaatgcccgctcccaccaaggccacttaagctcacgtgagaacacccaaatgaccgccaaactttgccacacaaaaagtgctacaaacaaaccaggtaaaataccgttataaatagcatccggaataaagtttagataaccattagatcccaaatattgaattaaacactgtattaataaaatattggtatctaaaaccaaccacaataaggctggaaccaacattaaacgcggctgattaatacgctgtgataagaaaataccaacaataagcgcaataaaaggccaaagtgcgtatcctattagaccttgtgagttgaagtcgccaatttgaccggcaacaagccaactataaagtgagttggtacacccacctaatactccccaaacaatgagctgaagaatagagggatgtacgatctgtaaggaacgtcttgaccccaaaaataaccacattccggcaagctggttacttttaaaatcatgccaaaagttaatggaaggtttgagatcaatcataaaaaggtttcaaaaatttcgtttttgtcaggcaccataagtgtatgcctgctaagaattttagcaatcatgcttttgaactatatcacatatatttgtacattattcaagcaataaaacttaaccttacataagcttactgaaagtaagcatcaaaacgacaagcatccccctgccactgatgggctggttcttgatttgctaaaaaaatagcatgtcgtggacgttttacaatcactcgctttgcaacttttttggctagctcaagcaaatgatcacccaaatccatttctccatcttcgggtaaaagtaaatgcaaaagctgcatctgctttttgacttgggcttgttttttaattgcttgttgattttgatcgcgctgtgggaacatcgggtcaaggtagaccacatcaactgtttttgcttcttgatctaattgctgtaaatagcttgcagagtcggcgaagagcagttgaatacgatccataaattgacttaaaaatggatcacgctgtgcctgagcttttgaatcctcaagtaaagtaaataaaatcggatgacgctcaacgagctggatttgggcacctagataagccataagtaagctgtcatgacctaagcccgctgtagcatcgactagtactggcttttcacctaactgacaagcacgagcaatcatttccgatttaagacttgctcgttttaaacgcggaatttcagctttccagtcaggctgcattttcatgccattagcagataaccaaagtccgttttcatctacacaaagagccaagtcaggatttaaacgtaaaaaacgggcattaagtttttcaataggctgtaaatcgacagtcacgcctctagaataaagcacagcttggtagtgctgtgcttgttcttgaaaatctacttcaaaatatatgtgcatgcgcagtgcctttaatttgttttgccctgatccgcaatttttttccatgcatcatcacgtaagtaaaccggtaaagcatgttcagcatcaacccactgcttttgcgctgcatacacacgtgcaatcgaagcaatgtcttgtgcagtggcagtgattgtttgatattctgcatcagtttgaagaagcttagcacccgaaccgattaagcaatgctttgcataggcagccgcttgctcgtagttcattaatttttcttcatctatacactgcatgatgcctcgctcatctagaacaaaacttgcaatgtaaacttcattcatacgtgcatcgagtaccgcagtcacctgttctaaaccttcaagtcggtaagctgcttgtgcgagagcttgtaaggtagaaacgggaaccacaggtaaatcttgtgaccaagctaaagcctgagcaacagcagcattaattcgaacaccactaaaagaaccgggccctcgactaaaggcaattgcatctaaaccagctacgtcaagtccggtttgctgtaacccttgctcaatcattggcaaaatggtctgggtttgtgctttcgctcgcgtatcgagttggaaaaagagttcttgggtttcatcgattaatgaaatggaacattgctcgtttgcagtttccaacgccagcagtttcatgcacaaccttagtattcaatcagattaaaaacggaagttatgataccccactcggctctgataggcgagttgttcctatctaaataaaaatgccaagctggtgcttggcatagaaaatatctcgctaaaattttaaaagtggaattctttcaaatcggtatagcttttaaagtgttcagcataatgtagtgcgctcaagcgtatttttgctgcgccttcttcatctaaagtttttacaatttttccaggtgagcccattaccactgagttatctggaatcactttaccttccggtattaaagcattagcaccaataatacagttcttaccaatcacagctcgatttaaaatgacggcgttcataccaatcaaactgttatcgccaattgtacaaccatgcaacatgactttatgaccaacggtgacatattcgccaatatttagctcaaggcccgcatcagtatgtaataccgaattttcttgaatattagaaaaattaccaatccgaacgacacaattatcggcacgtactacagcaccaaaccaaatactgacctgacggcctagttctacttgtccaataagcgttgcggttggagcaacccagccatcccatggctcatgtaaggcttttggatgctgcccttgatagctatacatcataatttatcagtcctgatctttattttttatgagaaaattttggcattccaaacgttggtgcattcagtagaaatggccattctttttggtagcctaaaccatatttaaataaggcaattaacattcgcgctgtgagcccccaaataatttcattatcaatctgcaagcttgggaagtataaagattgatgagcatatcgcacttcatatggcgtcggacgcgtctctataagttgctgtaaaggcacaaagaaaattcgatcaatttcggtgggctgaggaattaaagttacctcaggaggaataagcccaacaatcggttttacagacaagccacttcttgcacgttgcatcggcaaatcgcctaacaactgcacatcaaacggatttaaagccgtctcttcttgggcttctcttagcgctacaacaatattactagtatcactagggtcacgcttgccaccaggaaaagaaacttcccccgcatggttgttcatatgtattgaacggcgtgtaagcagtaccttaggattattttcattcgtaatcgcaataagtaccgcagcttgtgcttcttgtatgcgggtggaaaagcgcaatctttgctgtaacttttgtgttagcaagtgctcttccataccattcacctattattctgtctctctttgcatcatatctgaaaatcaaacttagggaatagagttgatgcgtaagtctaaaaattcagttatgctgaggcatctctatactcgatgataattatgagtttctgtgtagcgtgtgggcataaaaccgaacaaaaaattcctttaggtgatcataaagtacgccgtgtttgtactcattgtggaaatattcactatgaaaaccccaaagtaatctgcggtgccttagcgttatgggaagacaaagtactactttgtcgtcgcgcgattgaacctcgttatggcttatggactttgcctgcgggttatatggaattattcgaaactatggaacaaggtgcggcgcgtgaaactcgtgaagaggcagaagccgagattgaaatagaacaactttattgcatgtacaatattccccgtattgggcaaatttatgtgttgttcaaagcacagctgaaagatggcattttcggtgctggagaagaaagtatcgaatgtcgactgtttgaagaacatgaaatcccatggggtgaacttgcctttcctagtgttgaacacacattaagacattattttgaagaccgtaaacaacaagtttttccaacacatctagagacgttaggaactcgtttagaccatacaggctaatcaattaaataataaaaaagaccgcttttgcggtcttttttatttgttgaatatgttaagacttagttttaattgctttacaagctggaatagattgatcggcaagtttaattgttactgtaccaaatttacgttgagccaaagctttatccgcagcggttggagcaggcacatccttaagcatattatagctttcttgagctgccgcatgttgattaaaccaagccgtattattatcaaaattaatgcttgtactatccaccttatttgccaataaattaaatagattcaatttcgcaggccccggagaaacgcctacaaaagttaccccaaccatcacaccatcaatatttgcaaattttggattagataaaatcatacgaacataaacagattgatcaccatttaaaggatcattaaatgtcgctgctgtggtaccaattcgatattgttgcataccattgttatcaattaaacttgcatctgataccgtagcacattgaccagacatatccgttgttgtcgaattaggtttgatatcagtacgaatatcaccatgctcatcaatcacaatacctaaatttacaggttggatagtggtatctgagaaattaaatgttaaagtagcgtaaagagggaaaatatatttttctcctgtctttacattccctgatgttttaaaaacatttctctctagataactaataggattacttttaataatactcaataccccattgtagttatcaccatcaacattttggcgccagagaccatagtgttgtggattacctgtacttagcttcgtcaaatacttatagaatgcttctgtacccgccactccataatcattaaagaattttccttgataaatctgtagatcttcgtttggattatttgaaaaactcaaacggagtggtgtagttgactgaatttctcgactaacaggatttaaccaattattttgtgcatttacattgagtttagctggtttaacttttgtagttaacaaatacggattttgtactttgttatctattacaatggcacttcccttccactgtaaaccatagcccaacgtataaccttgacggtccgataataaataaagatcatctgttgaatgacgtaagttaattgtattattcaagcattcttcctgagtacttctattgcaaccattaaacacttgataattttgaaggattgttgagttaataaataaattgaatgattggaaaacaccagcattacttaaattagtcgtttgtactaaaagtttatatgcatcatcatcagaaatttgatttacatctaaccacggtttcaaaatacttgcataagctccgttttggaactctgtagcagttacgctctgagaaattttagtaagttgatctttctttatatctgtaagttgagtgggttgtatatcaccgatgagattatcaccattttctacaccaatgctttggaagatttttattaaagcaatcgccactttaattgtttcatcatttttatctaatgttgttggtgctttacctgtaataccacttgctaaatccaacactcttaaatatatcggattgatctctttagacttaccattaacggcagtaaatttcccaatcgtatcaagattaacatttcctaaaaaaacctttttattatctttactttgaatataaaaacgtgctgtatcaccaaccttacaggatcctattacagcatttcctgaaattttagtcgcataatgaaaatttgtggcagaactacaatcaaaattgatacccgctattggataatctaaagcaaattgcaaacaagttgaatcttctgcaccattatcactagtagttggtgtacaactgccagaagttaagtttccgttattagtaccagaatttggatcttcattaattgtcgaacttcctccaccacaaccatttaacatcaatgcaattgtggtaagagcaaaaggccataaaatttttttattcatttagctaccctacttatttttaacgtaataccgaaatttgaatttgtccctgatttgttaactctttttctgtaacatccacggcagaagataaaggcgtcatcataatataatgtgctgaaggcggtacttttaaaactccttgaatcgatgcatgctgtaacatagtcgaaggataagatttgcttttaaacccgctcactccttccaaaatacagcctttatcatccaaaaatacaacgagtggccaataatatagaggcttctcattactagaagcaaaagatataacttttaaatgctgaacagaaggatttaactgtaccaactcatattcaaacttttctttcaatggcttccgtggccataagtttacttccttatttatgctaagcgttttaattgattttttataatctttaataaagcacttatcttgttcaaaagctgcttctagctcttgtgaagacaaacgcatatacgttggtgctaaaacaacagtagagtcttggtcttgagtttgtcgattgaaaagctgatctaaagttgatcgacttacaccctttttccgctctactgattcagtgcgccccaaaccatcaggcataaggtaaaaccgctttttaccttcaaggttaaattcttgatcttcaagatattcattatttacatactctacgccatcaatagttgtaaatttagatttatcgagtgaagaatcggaggatggtgcagcttgagatgtactctttattggtggaggaacgagaactaactttttttgccattcattattagatactgaaggggcatttccgctctcaataattttatttttttctggggatgtttttaaatcatcactgactactgaaacagtttttgtatttttctgagttttttgcggtgcagtcggtgcagtcggtgcagtcggtgcagtcggtgcagtcggtgcagtcggtgcagtcggtgcagtcggtgcagtcggtgcagtcggtgcagtcggtgcagtcggtgcagtcggtgcagtcggtgcagtatttaatttttcttggacatgttgttccagttttttcggtgaatttttaatttgttctttttctttagatgttttttgtacagaatctactattagtggattctgctgagtttgtggttttctttcctctattttagggataggttgttttttctgatcaattcttttactcggtacaatcataggccgcccatctggcccaataattgtataaaaaccgtctgcataagatacagaaatactggctatcgcaacgcataaagttgtgatagcgactttaggtcgaaatatccctttatattgttttaccattttgttctatagctcaaaccaagtactgtaacttttgtattcgtttttacatctaagccagaataagggtttaataaaatattatcgacaccacatttattcgataaagtactcgtacaagctgggatgttgtcacgactacgaaggaaccctactgaaagatctagatctgtatctgcatcaaaacgataacctacaccaagaccaaataattgtgcgttattaattggaaccatggtattgcgtttgtcattaggtattgaactggcacgaggctcataaccagctcgtaatttcaaacgatcagttgctgaatattcaaggccaatcccccaactccacggcgatgtaaattttaatggtaatgctaaagaattatcagtaacgtcattagataaaagtttagcaacttttaataaggtgatttggcggtcaaactcaaatttaaatttattccatgccgaataatcagtccatccaacatctaaatttaattgtaaatctggcaatattttatatttaatacccgcttgaaaatgtgctgggtattcaagatccattgcaaccaaaccggactcaatatcaggaacataaccgggtaagccaagaatagcagctaaaatttggcctgttgcagaagaattcaggccacgtactagctcttgaggtgctttggcattatcaatcatatatttaccttttagacgcatcttggctgcactttgatataccataccaaaaccaaaatcgtctgttggttcccatagcaatcccaagttatagcttggacttaatgattgttctaaagaaacttgtaaggcacccattttattaaatgggttcattccttctttagcattacaaattcctaataacaacaaatcagtaatcatatcgttattatctttgaagggtgcgcacaccacatcatcgaccatacgtaaaacaccaatcatttcattaggaaaacgtagatcagttttcagtgcgattgcgttataggacatccctacggaagcaccaatagataaatgatcatttacctgataaccaaaagatggcgataaataagtgatccgctcaactgcaacttgctgtcccatgtagttgcctggattaccattttcagctccgaaacctgcgactaatggtgcatacatagctgtagcataggtgacttttgatcctggtggcttataggcaattccggctgtaggggcaactagtggataacccgccccaagatcaaccatctttttaagaattggtacatataaacttgcatattcaacatcaccatgtactgatcctttaaaatctgtacaaatattagctgaaacctcaggaccatcattacaaacaagtgggtcatcggaataaccaaaaatgttataaccaggtggagcggagaactcacgttgaatatcgaagttagcaagaatcccctgcacatctgtttgcagcccatcaatttttgctaaagctgcagggttaaaatggactgcactaatacctggagggtctgcagttacagcattccccatcgatagtgagcggatatcaacagctaagttttgtcctaattgagcattggcaaagctagaaaaaccggagataacaattgccgccgttaaaggacataatttaggatatttcacctgcatatctccttatttttgttttttattaaaacctaaaatatctaacgggaatgacaaaccaagtgaaatatctggcgcatcttcggttaaaccaataccaacggtaccgttaacaatcgtttcaggtgaaacccgaacacctaaagcaaaagacaacatcgcactactttgatcaggtgatttatagctttctccattttcaaactggaattcggcatccatattgaaactttgctgatatgacatggttaaagacacatcatagttaaatgagtaagcgaaaccaaaagaaaagccaccgctaatccctggatcaaatgaagttaatgtacgcgaacctcgggcttgattaaggccactttctttaaagccgtaattggcagaagcagaagcaaagagaacgactggatcaatatatttacgggtacttgcacccacaccaactgagtaataacctttacccgttgacaattcatctaaaccaatctcataaggactatcgccagtcttcgttgacaggctaccaaaaagaaccaaaggtaaacgaccttgttttaaaggaaacggctcccaacgtgcaccaaatgaaatatctcccaatcctgcagttgttgtatcacgaataatttcagactttgctacaaaaggaagagttgcggataaagttaagttatctaataccccatattgcaaagtaaaactatttgttaatgtatggtttgcatcttcctcaacacgtaaacggttgagctgagaggaattatccgataaggctaaatcaatacgagtatcacgataataagtgtagtcaagatcataataagaagaaattacacccttcttaatcaaagaatattggcgctcatttgaagtaaatacctcttgtaaatttgtctcctggctagcatcaccttcttttttctgtagtgcacttgctgcttgatgtgcctcactattagatgctggaactacattattagtttcagagacattagatgtttgtgtagtactatctgttgtagcctcactagaactagcagtatctgaagcaccagagttttcatttgcttctacagactgattagaatcggatacttgcgttgattgcacttgatcttcggcataaattgtccctgtaatggcactcatacttaaagccaacacactcatctttatccatcgattattcatgtttttcccacccaatttatttattttactaactttaaatttgactatttacgcttgtaataaagccgcatataggtttctatcggctgtccataagtcgcagaatgattatcgttatccaagacacgcctcatagttgatgctttgtttgctaaacggtcataattaaacgctggatattgcacatcaacaaaagcatatctattaaccgttgcatcttccacatggcgcatatctgcatcttttaacgccaataaatctttacgctgtgatgcaggaacagaaataacaaataaagtattattatcccaaatttctttaaaacgcccctcatcaaaactgatattccctaaagcagggtcagctacgtatactcttccatctttataagctttatatacgacaaaatgtttaaaaccagcatatgaaataggcacaattgctggctaccccagtttgactaaatcagaaaactcacctcgataaccaccgctttctaaaccaattgctgtgacaaagcgtttcatatcaagtaatgagaaacttcgtcgctcaataatacgttgatattcgccatactgcagcaaaccactcattgtttgctgttcagttaaacttgttccaacatagccgtttaataaagtcgtaagcgcagcagatccacaactataatcgtaggcttgccgaacaataccacgaaactggtcttcaacagctggttttatagtaactggttcaatatgatttcgatgaaatgataaattacgcgaatcggcagtctctgtataataaacagttcccggcggctttttttctatttcaaaggcttctgtcgcaaagtaatacatcaatgctgagcctaaaactatctctaacataagcacttggtctaaatggtggcctaaccggccttattcattttattcttagagcaatagctctacatccctgtgtgttgaagataccttttttttctgtaaaaaacagcttttttttaatctttttgatgaatgcatagttttacatttataaactgataattaattctcgttttcaaatgttttatattctttcctattatataagctaatattatttaaacagaaaagcatagatattagttttattaaaataaataaaaaaagcgcgtataaacgcgctttttacaaatctttaaattaatgaccagagatagtaattgtagatttacccacatttaaaccttgaatttccaaatcaccaattgaagcattacccgctgcacctaggtgtacgccttgtgcataaacattcataccttgcgtactgttattttggatacgtaaacctgtaggaactacagaaatatctgcatttacatccaagtcaccagttgtattaccagcaccacgaaccattactttgtctaggacaattttaccgccacctgcagcatcattaataccgaagttagatagtgttaaaccaccttgcaaactagagttcactttaatcatcgcgccttgcggagttgaacctaactgaacatttgcagaaatttggcccaaagataaatctaagccagaaataatttcagttggagctgtttcagtaataccacgtacagcggttgtttgatttaacgtaccagaagtacctacaccaattgaacctacatgtacatcaaccgcacctactgttgcagcaacgtttaagaaagcgccatttgaaccagaagcaccatttgtgtcaattgctaaatctaaaagattacctgtacctttttgagttacagtgacaccactaattgcgattgcaccagcagtacctgaagcacccgtaataccagttgatgttgctaaaccatcattatcgtgtagatatagtttatcgatagtaataccgcctgaacctagagcgataccaatattaataccatcttgacctgtagcagcactgagcgcagcatcatccattgattgcattgccattgcatttgcactgatagctaaagaagaaactaaagcaagtttagtgaacattttcattgagcactctcccaagagcatttattttttgactttaaccactcttactgtctcaagttgcatttttcttttatggcaaccgaaacttccaatccttgagtagttttgcttagcaattactaaattacagctacgttaatttttgttcaactagtgtaatgcattttttgccaattacccgacaaacggtacggcgtcaaactgactaaaaagatttattactattctgaaatctgaaggataattcgattattttttccacgaaatgttagggtcttttcactcaactgcctgttgaactctaacttgtagtaaactatgccacctcttccaaactctcacatgtttaaaatgtctcatttaaagaaaaaaatctctttagaaagctattactccgctgctgatattttaaaaaaattagaagagttaactggacttgtatatcttcaagatgataacaatcctgttattggttttttgccaaaaaattatttaatcactcaaaataaccaaaactttttattcactaaaactgatttaaataaatataagttttcatcttatatagaaaatcttttagattttacacaattccaatctcaagaactaaaaaatagcaatagagaaaaaataagttttaagggcggatatattggttttattagttatgacttttctgcacatcaatttataaataatcaatcacataaacaaccgtctttatttataggttcctattattcttttattaaaaaaataaataatgaatggtatttttttagcgatgaaaataatgcttttgaaatttttaactatctttcagatctcctcaataaacctgctaataaactacaaaaaaataattttaaactagaacaaaatattcatcctcgctggtctaaaaatacatacttaactgcttttcataaaatacaagaatatattaaggcaggagattgttatcaaattaaccttactcaagaattcaaagcgaattttactggttcattattaaataaagcagatgagctatggaatttaaccaatgcaccatattctggttatttaaaattaacagaatttgagttgttaagttgctctcctgaattatttattgaatttaatgtaaataagcaaattaaaaccagacccattaaaggtacaatgcctcgttatgagaataaagagcaggatttactttcaaaacaaactttaaaaaattctaaaaaagatcaagcagaaaatgtgatgatcgttgatctattacgtaatgatttgagcatttatgccaatacaggttcggtaaaaacaacaaaactattcgaaattgagagcttcaatcaagttcatcatatggtgagtgagattacggctacacttaaaaatgatattaatcctatgcagatgttgctcactgctttaccaggaggctcaattacaggagctcctaaaattcgggcaatgcaaattattgaagagctagaaggcgcacctcggggagcatattgcggcactttaggatattttaatttcgatggtactggacgctggaatattttaattcgtagttttcaacaatatcaaaaccagctctctatttgggcaggcggcggtattactattgcttcagaggctgaggctgaatatcaggaaagtcttgataaaatctctgctatgctgaacttgatgaacagcacagcagaataagtattaaagaatatcttgcttcaaagtttgaactaaacgcgcgttttgctcattagttccaaccgtgatacgtaaaaactgattaatgcgaggcttattgaagtaacgaacaataatgccctgctcacgtaatttttgtgcaagttgcccagcatcatgctgtgaatgcgtagcaaaaataaaattcgctttcgatggcaaaacgttaaaaccaagttcagttaaatcacgaacaagtttctctcgacttgttataactttttggcactgctcttcaaaataagcctggtcttcaaaagaagctaccgctgctgcaatagcaaagcgatcaattggatatgaattaaaactattttttacagcctcaagtgctgcaatcaagtgcgactgagcaatcgcaaatccgactcgtaggcctgctaaagaacgagactttgaagtcgtttggcataccacaagattttcatagcggtttatcaaacttacagctgactccgcaccaaaatcaacatacgcttcatcaatcacaaccacgcggtccggatttgcctgtaatacttgttcgatttctgccaagctgagcgcaatacttgttggtgcatttgggttggtaataataaccccaccatttggctgggtataatctcgcacatcaatttcgaaattctcattgagaggaatttcttttgtttttgtgccaaaaaattggctataaactggatagaaactataagtgatgtccggatacaggattggtccatcttgaagaaaaaatgctttaaagatatgagccaatacctcatcagaaccgttacctacaaaaacttgagatacatcaatattctgttgtttcgcaattgcttgctttaacactgtcgcatccggatctggatatagacgcagcacatcggcttgttcatgtaacacctcttgaactgcttctactacttttggtgatggtggatacgggttttcattggtatttaactttaatagattctggattttaggttgttcacctggcacatacggctctaattcacgaacctcaggactccaaaaacgcatttgtgctgtagatacagtcatagtcttatctcaaaaaagggctgaaagtcagccctgaataatcatgaaaaacactgataggcttaaaacttattgataacgataacgcgccgagcgtgcatgggcatcgagattttcttgaacagcaagtacatcagctgttttagccaaagtcttaacgccatcttttgaacacatgatcaaactagagcgcttttgaaaatcatatacaccaagtggcgaagagaaacgagctgtgcctgatgtcggtaatacgtggtttgggccagcacaataatcaccaattgcttcaggtgtatagcgacccataaaaattgcccctgcatgacgaatatcttggctcatcgcttcagcatcatcaagacatagttccaaatgctctggtgcaacctgattaattaaatcaactgcttcagcacggtcttttaccaaaactaatgcaccacgatttttaatcgatgtacgcgcaatctcggctttaggcaattcatttaaatgtttctcaattgcagactctactgcttctaataatgcttcatctggagtaatgaaaatagcttgagctactgtgtcatgttcagcttgagataatacatccatcgctaaccattcagcattattcacaccttctgcataaactaatatttcagaaggtccagcaatcatgtcaatacccacctgaccaaatacagcacgtttagcagctgccacaaatcggtttccaggacccgtaattttatcaacacgtggaacagtttgagtaccataagctaaagcagcaacagcttgtgccccaccaatggtaaatactcggctaacacctgctagataggcggcagctaaaacgagtggatttagttcaccatttggggctggcacaaccataataatttcaggtacaccagccacatgtgctggtaccgcattcataagtacagatgaaggataagatgcaagtccgcctggtacataaataccaacacggtcaagtggagtcactttttgtcctagggtattacccaaatcatccacataagtccagctatcttgtttttgagcttcatgaaaagtacgaatacgatcagctgcaagtttcagggcttcacgaatctcttgatttaaaccatcaaaagcagctttaagttgttgttgagacaattctagatcggaaaattgatgcgctggatgtcgatcgaactgttgagtaagttttaaaacatgatcatcaccatgctgacgaacatcagcaataatttgatctactgtttgaactaaattaggatcattaacggtttcaaaagctaaaagctcggcaaaaacctgtttgaagttctgatcttgagtcgataaacgtcgcatcaatttacccacaaggcgaaaaagaaaaaccaagtttactctttttctaagctcttgtgggcatcatatctacaactatcgcaaaagcatgataggaaattacttttaacgtgattgaacagcttgttcaagttgggaaatgattgggttcaataaaacctgtttacgcttaaagctcgctttattgacaataagacgtgaagatactttgcaaatttcttctaatggctcaagaccatttgctcgtaaagtatttccagtatccactacgtcaacaatataatcgcccaaaccaactaatggtgctaactccatagaaccataaagtttaataacatccacctgctcgcctaagctcgcataatattgacgtgtaagattgacatacttagtggcaatttttaaacgaccttttgggcgttccattcctactttaccagcagtcattaatttacatttcgcaatctgcaggtccaataactcatagacatgctgagcgccatgttccataagtacgtctttacctgctacacctaagtcagctgcaccattctcaacataagttggcacatcagacgcacgtaaaattaaaatacgaacctgcttatgtgtggttggaaaaatcaacttacgcgatttttccgggtcttcaagcaagttaataccggctgtagcaagtaaaggtaatgtttcttttaaaatacgtcctttactcagtgccaaggttaaaccatgatcaaaattacccattacgttaaaattaggatcatcgtttcttacgtcattcattaacttactcgcttaattttggcacctaaaccttgaagtttttcttcgacatgctcataaccacggtcaatatggtagatacggtcaattaatgtatcaccttcagcaaccaaagccgctaaaaccaaagagaatgaggcacgtaaatctgttgccattacaggtgctgcttgtaatttttcaacacccgtcacaacagcatcatggccttcgacctgaatattagcacccatacgtgacaattcaggaacatgcatgaaacgattttcaaaaatggtctcggaaatcgttgcaaacccacggccaattgcatttacagccataatttgtgcttgcatgtcagtcggaaattctgggtgaggtagtgttctaaaacttactgctttaggacgcttacccaacatatccaattcaatccagtcatcgccacgggtaacttcagcacccatttcttcaaacttatctaaaacagcctcaagcaatgaaggatctgtatgggtggtttttacacgtccaccagtaatcgcagcagcagctaagtaagaacctgtttcgatgcggtctgcaacaactgcatattcacagccatgtagactttctacaccagtaacaaccaatgtatccgtatctaaaccttcaatttttgcgcccattttaataagcatttgcgcaagatcagtaatttcaggttcacgtgcagcattacgaattgtggttacaccgtctgccaaagcagctgccattaaaatattttcggtaccaccaacagtaaccatatcaaaaaccacttcgccgcctttcagacgaccatcaacagtggcatgtacataaccattttcaacttcgatatgtgcacccaatgcttctagggcttttaagtgttgatctactggacgagagccaatagcacatccaccaggtaatgaaaccttggcatttccgtaacgcgctaataatggccctaataccaaaatagatgcacgcattgttttgacaagctcataaggagcaaactggttatctaaagtagaagtatccgccttaaccgtgtcattttcataactaattgtaacacccagtccaccgattaattttaccaaagtatttacatctttaagatttggaacattggttaatgtaattggagagtcagcaagaatcattgccgcaagtaacggtaaagccgcatttttagcaccagaaatgcgtacttccccttcgagcttaacaccgcccgtgattaaaaatttatccattaatatttaagctccgaaaaggcttgctttgcgccattcatctttggtcatcgcacgaattgttacggcatgaacttcgccacttgcaatataagtatttaatggtgcataaactgcttgttggcgggcaacagtacgcttaccttcaaattgatcatccacaatacggaggtcaaattttccagcctgtccgctcaccactacttccgcctcaggaaaagcttcttttaaaatttgagtgagctgttcactattcattgcaaagacctctgacacaacctacggtgtaaaacgaagtattttactataactttttcaaagaattcagtacgtgtttatattttatcaataaaaaaagaggctatatttcaagcctctctcaattattaaaaacttattaaatagaaacagcaacttgagaatacgtacattgcattttccgatattttaacaattgtttttttaatttttcagtcagtttttttattgaagtatacatatcatccgctgttgcttgagcaaacagctcaattccaggtaatcgaactatcgcttcagccacatgattagagctacctttatgtgagcgcttatcaatctgatgatctttcgttaatttaatctgcatactattcacctgatcaagatgtttcgttaactgattaaattttgctttaatattttcttctatagctggtgtaattgctaaatgatgtccacgaatcgttatttgcataattctatccctcacctttttgggttatataaagaagaactaaaacgatttaatgcaatctaaaaagatgatttgggacaattaaaccattttagctactcctcttggtgaaaatgaaatttcattatttcgtcataatgaatgagtagaatagccatacttcaaaatttagatcaagacttttctctcggatgacgatggaatatgtaacgattctctatattttgctacagtccttctagctacttctattccctcctctttcaataaagcagcaattgcattatcagacaaaggtttacgcggattttcattagaaactaactttttaatcatcgcccgaattgcggtagaagaagcctcacctcctgtggttgtccccacatgactagaaaagaagtatttcaactcaaaaagtccacgtggagtaagcatatacttatttgttgtaacgcgagaaacggtcgactcatgtaattctacttcttctgcaacatcccttagtactaaaggtttcattgcttcgggacctatttcaagaaatgctttttgatgctcaacaatacaagtcgcaacttttaataatgttttgtgccgttcatcaatactttttataaaatttttagcctcaagcatttgattacgtaggtataaattatcatcactttgatctgccctacgaatcatactcgaataaaaagaattgattcttaattttggcatcacatcagggtttaactgaacttgccaatgcaagtccttcttggcaacgactacgtcaggaatttgatactctgattcttgcttttcaaaatccatgcctggataaggctttaatgtttttaataaatcaactgcaaattttaattgttctttggaaagccctgtttgcttcaataatttattaagatcattcgcaatcagtaattcgtaatattgaagtagacttctggcttctttcaaatattcagtttctcgaggcaagaactccaactgaacttttaaacattcagctaaattacgagctccgataccaattggatcaagacgttgaatatgttttaagactactaaaacttcatcctcttccacttcctcgtctatatccatctcacttaataaatgctgtactgccaaaataatctcttctaattcagcatccagaaaacctttatcatctaaagcatcaactatgcaataagcaatcaactgatctatttttgaaaaatgtagtaagttcacttgctccaaaatatgttctttaagcgtcaggtgaacttggcgattatcttcacgctcttcgaactcaggagtacccaaagcagtggattgatgtgtataaatgtcatcccattcagtatcaacaggcaagtcatcaggtaagtgatcagcattcaactctgttgtaaggtcatctgtttctttgtgttctaaagtagataaactttctgctagtgattcatcttctactttttcaagtaatggattactatctaattgaatttggatttcttgctctaattctaggctagaaagttgtagtaaacggattgcctgctgcaattgaggcgttaacgataatgaattcgcaactttcaatccaacagataatttcatatatttctctttccaaaaaacaagcaaaaatcatgcctattaattatttatagcatagagttctgatttatcctatacattgactcatcaattcatgagaaaaatagaaatttatttattaaaaacgataggatttttattctgtcttattctttagtatcgatgattctttgaaataactcttttctgattgctttcttgatataaaaaaacacccccaaccactggttgggggtgtttagaataatgagctggcgatgacttactctcacatgggtaatcccacactaccatcagcgctaagaggtttcacttctgagttcgggaagggatcaggtggttcactcttgctatggtcgccagcacaactgtttatggatacttgcttaggtcttatttaatgccgaagcgttttccaaatctgtaacagactgggctgaattgaatcttactttatctgttcattttagctagaggtataactaaatcaagttgtcttgcatacttaagaatcgattgatgcttcatatacaactgcttgggtgttgtatagtcaagcctcacgagcaattagtattggtcagcttcacatatcactatgcttccacatccaacctatcaacgtcctagtctcgaacggctctttagaggacataaagtcctagggaaatcttatcttgaggtaggcttcccgcttagatgctttcagcggttatcccttccgaacatagctacccggcgatgcgactggcgtcacaaccggtacaccagaggttcgtccactctggtcctctcgtactaggagcagatcctctcaaatttccagcgcccacggtagatagggaccgaactgtctcacgacgttctaaacccagctcgcgtacctctttaaatggcgaacagccatacccttgggacctgcttcagccccaggatgagatgagccgacatcgaggtgccaaacaccgccgtcgatatgaactcttgggcggtatcagcctgttatccccagagtaccttttatccgttgagcgatggcccttccatacagaaccaccggatcactaagacctactttcgtacctgctcgacttgtgggtctcgcagttaagcgcgcttttgcctttatactctacgcgtgatttccgaccacgctgagcgcaccttcgtactcctccgttactctttaggaggagaccgccccagtcaaactacccaccagacacggtcctcgtcccggatcacgggacagagttagaacctcaacattaccagggtggtatttcaaggacggctccactggaactagcgttccagcttcaaagcctcccacctatcctacacaagtaaggtcaaagttcagtgtcaagctgcagtaaaggttcacggggtctttccgtctagccgcgggtacactgcatcttcacagcgatttcgatttcactgagcctctgctggagacagcgccgccatcattatgccattcgtgcaggtcggaacttacccgacaaggaatttcgctaccttaggaccgttatagttacggccgccgtttactggggcttcgatcaagagcttcgcttacgctaaccccatcaattaaccttccagcaccgggcaggcatcacaccctatacgtccactttcgtgtttgcagagtgctatgtttttaataaacagttgcagcggcctggtttctgcggctgtcgtcagctcaggaagcgagttccatcaccaacaacagcgtaccttctcccgaagttacggtaccattttgcctagttccttcagcagagttctctcaagcgccttggtctactcgacctgaccacctgtgtcggtttcgggtacgattcctgtgtaactgaagcttagagacttttcctggaagcatggcatcaaccacttcgctgtacaagtacagcttgctatcagatctcagcatagagtaccccggatttgcctaagatacatgcctacatcctttcacctggacaaccaacgccaggctgatttagccttctccgtcctctcatcgcattacacagaagtaatggaatattaaccattttcccatcgactacgcctttcggcctcgccttaggggtcgactcacccagccccgattaacgttggactggaacccttggtctttcggcgaacgggtttttcacccgttttgtcgttactcacgtcagcattcgcacttctgatacctccagcatgcttctcaacacaccttcatcggcttacagaacgctcccctaccacgtatacaaagtatacatccgcagcttcggcacatagttttagccccgttacatcttccgcgcaggccgactcgactagtgagctattacgctttctttaaagggtggctgcttctaagccaacctcctagctgtctatgccttcccacatcgtttcccacttaactatgattttggggccttagctggcggtctggattgttttcctcttgactacggacgttagcacccgcagtctgtctcccggatagtactcataggtattcggagtttgcatcggtttggtaagtcgggatgaccccctagccgaaacagtgctctaccccctatggtattcgtccgaggcgctacctaaatagctttcggggagaaccagctatcaccaggcttgattagcctttcacccctatccacaagtcatcccctggcttttcaacgacagtgggttcggtcctccagttagtgttacccaaccttcaacctgctcatggatagatcgcctggtttcgggtctatacccagcaactaaacgccctattaagactcgatttctctacggctcccctatacggttaacctcgctactgaatataagtcgctgacccattatacaaaaggtacgcagtcacaccacgaaggtgctcccactgcttgtatgcatgcggtttcaggatctatttcactcccctcacaggggttctattcgcctttccctcacggtactggttcactatcggtcagtcaggagtatttagccttggaggatggtccccccatattcagacaaggtttcacgtgcctcgccctactcgtcatcattatgtgtgccctttcgtgtacgggaatatcaccctctacgttcgcacttcccagagcgttccactaaaacacacataacttaatgggctgatccccgttcgctcgccgctactgagggaatctcaattgatttcttttcctaagggtactgagatgtttcacttcccctcgttcgccttgcaacactatgtattcatgttgcaatacctaccttaaagtaggtgggttcccccattcagacatctccggatcaaaggatatttgccgcctccccggagcttttcgcaggctatcacgtctttcatcgcctctgactgccaaggcatccaccacatgcacttaattacttgactatacaaccccaaacagtcgatgttacctacaagttagtaacttcaacatttcagtttagagcactgtgcacttaagcactgtacagcttcaatctaaattcacataccaaaacgcttgattcagttaatttgctagttctcaattcatctagattaattgcttaacctaaactcttgagtgaacaatttatttcagactcaattttgccaatctgttaatgagttaatgtgtcttcgtcagatcacactaattaccgtgataatgaaatcacagaagttaataaaccaagatctcaatctttatttactaatttctgtaatccgaacttatcttaagttctggtggagactaggagagtcgaactcctgacctcctgcgtgcaaagcaggcgctctaccaactaagctaagtccccagcttacatcatcaatcatgtatcttttatctataacttcaaccagtcaaagtcatggtgggtctgacaagacttgaacttgtgaccccacgcttatcaagcgtgtgctctaaccaactgagctacagaccctcagatacatctatgaagaacaacttgttgtggattcttaccaatcgtcaatctttcgttaaggaggtgatccagccgcaggttcccctacggctaccttgttacgacttcaccccagtcatcggccacaccgtggtaaccgccctctttgcagttaggctagctacttctggtgcaacaaactcccatggtgtgacgggcggtgtgtacaaggcccgggaacgtattcaccgcggcattctgatccgcgattactagcgattccgacttcatggagtcgagttgcagactccaatccggactacgatcggctttttgagattagcatcacatcgctgtgtagcaaccctttgtaccgaccattgtagcacgtgtgtagccctggccgtaagggccatgatgacttgacgtcgtccccgccttcctccagtttgtcactggcagtatccttaaagttcccatccgaaatgctggcaagtaaggaaaagggttgcgctcgttgcgggacttaacccaacatctcacgacacgagctgacgacagccatgcagcacctgtatctagattcccgaaggcaccaatccatctctggaaagtttctagtatgtcaaggccaggtaaggttcttcgcgttgcatcgaattaaaccacatgctccaccgcttgtgcgggcccccgtcaattcatttgagttttagtcttgcgaccgtactccccaggcggtctacttatcgcgttagctgcgccactaaagcctcaaaggccccaacggctagtagacatcgtttacggcatggactaccagggtatctaatcctgtttgctccccatgctttcgtacctcagcgtcagtattaggccagatggctgccttcgccatcggtattcctccagatctctacgcatttcaccgctacacctggaattctaccatcctctcccatactctagctcaccagtatcgaatgcaattcccaagttaagctcggggatttcacatccgacttaataagccgcctacgcacgctttacgcccagtaaatccgattaacgctcgcaccctctgtattaccgcggctgctggcacagagttagccggtgcttattctgcgagtaacgtccactatctctaggtattaactaaagtagcctcctcctcgcttaaagtgctttacaaccataaggccttcttcacacacgcggcatggctggatcagggttccccccattgtccaatattccccactgctgcctcccgtaggagtctgggccgtgtctcagtcccagtgtggcggatcatcctctcagacccgctacagatcgtcgccttggtaggcctttaccccaccaactagctaatccgacttaggctcatctattagcgcaaggtccgaagatcccctgctttctcccgtaggacgtatgcggtattagcatccctttcgagatgttgtcccccactaataggcagattcctaagcattactcacccgtccgccgctaggtccagtagcaagctaccttcccccgctcgacttgcatgtgttaagcctgccgccagcgttcaatctgagccatgatcaaactcttcagttaaaatcattttgcaccttatttatagacaaggtgccaattctggctcatcaattactgacttaaatttcgctcaaataaacttcgagtaatttaaaccaatcaatcaatgaaaattatttcgattaatcaatcagtaaaaatccacacaagttgttcttcaattctcttaatgatcttcttactggttcgtcaccagcaagctaggtcggctatattactcttaatctcttaaaagtcaacaggtaatttcgatatttttaaaacttattctctaaaccatctcatcatcaaattcatcacttaaagcaaccaatctaatcacaagtaactgtttttcaacaagtttctatctgcatcaccgccgatggatgtgcattatagaccatctctctccctttgcaacccctttttatagcatttcacaccaagcgtacattttttaggctttttggctatatttctatataatttgatcaattttacattgataatagcttatcgcttctgtattaaaatatatctctacccaactgcatattgaatatagcctggctagcggttaaggaattatatgaattattctaatttacttttgtcgagcttattaactgtaggtctttacacctcagcccatgctcaagaaaatcttactgaagaatctgccgctagttcggaagatgttacttcaacccagactcagcatagccgacctcacttacaaattattaaagatttgaaaggtataaaagttaaagatttaaagatcaacgcaaatgctgctcaaccggatacagtgaaagatccattacagtcactgaaccgtccaatttattcttttaacgatatgttagaccgccatgttttgcgtcccgttgctgttgaatatagagaaaagacgccagaagatgtacgtggttcttaccgacaatttcgtaaaaaccttggcgaaccatggaatgctgttaaccagctaattcaaggacgtcctggccgcgccgcaaaaactttaggtcgttttactattaatacgttaacaactttaggtttagccgatccagcgagccgcttaggcttacctcctgaagaagaaagttttggtgtaactctcggttactatggtgttccttctggaccatttcttatgctgcctttctttgggccaagcactttacgtgatggcgttggcttggctgtagatgctcaggcccgtccacaaaaatacattatggatgatcaagatggcctgtattggtcgactaatctattacaagccgttgatacacgcgctcaatatctagatttagaccaaactatacaaggcgatcaatatgcaatgattcgtgatttatatctccaacgtaaagcgttccagattgccgagaaaaaaggtgattcggcagatgtgtcttttattgatgatgacgaatccgaagatgtaccagaagataacactgataaaaccgaaaaataattaaaggacaaatcaaggtattgcatttttcttataataaggcaataccttgattttggtcatacatcctctatgatggataaagtgatcttgaaaaaggactaccatatcttctatgtattttattaaaccgacacgctctatccctttcgtagagcaagctctggaagcattaccagacttacaagtcattcacatagatgatctcgatttatacgacccaacaattatcgcaattgctgatgtacaagatttcctaacttataaatggcgtttacctacaatcgtgattgcttttgagcatgaaggtagtgctttagctcaagcatgggaagctggtgctcttgcaggatgggtatggaaccagttacctaaagatctaaataaagctttaacaagaattgatgcacaatataaacgtaatcaggatagccgtgatttaccttcggcagcagaattacaaaaacgtttattgccaaatcctattgatttattaaattatgaggttgaaacttttttccaaccttctgcctatttatcaggcgactggtacgactactggaagctcaatgataaagaggttttattttatctcgccgatgtatcggggcatggtgtaacaagtagcttattaacttcttggatggcagcctttcatggtcgctccaaaacaccacgacagttaatcaaaaagttaaatgggatgctagttcaagagaatattgaaaaacatattacaattgtggtcggtattctaaatcttgaaactcatagtcttcgctggtctagtgcaggccattaccctcctccaattatttttgaacctaatcaacctccaaaaattttaaccaccagcagctttcccttagggttaactgatgagttagaagttgaagaacatgtatgtacattaaatcgtcatgcacgtttcattatttgctcagatggagcactagaaccatttgatggcggcttgaatgatcagtttcaacaattagttcaacatttgcaaaatcaatcattccaagcccctgatcacgttgctgatgacattgccatctttagtctttgtcgaatgaattaatttaagaatcaattaattacataatatacgacttaaggactcttgagtctgagatggcactatgtgataatttttctatccttctctgaaaatggcatttatatgtcaacaggtcatgttgaatatgcaagtttaaatggaacgcatattttcaagcttattggtgaagtgcgagcccattcttgtataagtctagacaaacttttaaacagaattgaacagcaagaaaatgttgttggtgcaatcgttgatttaacccaaacaacatttattgatagtactgtattaggtatcctagctaagctaggtttaaaactgaaacagactcatcatattcaagctgtgatgctatctaccaatccagatatcacaaccttagccaacagcatggggctagggcaggtttttgtcatcctgaattattgtggcgatcctaacgtttgcactttaacgttaaatgacgagcacattactcataatgcgatgctaagaaccgttctggacgcacataagacattgatgaaactcaatgcaaataatcagaacatgtttgagccgcttgttaagcaattgcaaaaagaacaagacacgcttgaacaagtatctgataagcaaaatgcctaaactttattgctaatctggatgtgtatatgactcttgtttcagttgttcaaatgaattcccaagatgacattgaaagcaactttcaagtaattgagtcattgattcagcaaagtaaggctcaaaatgccagcttaattgtttttcccgaaaactttgtttgttttgcggctggcaaacagcgtgaaacagcagagcaatttgagtcaattcaacaaagacttgagaaacttgcgcatcagtatcaaatctggattgttgcaggcactctaccgtgcccatttcgtccggatggttccatcatacaagatggtcgagtgcgtacagtgagtttatgcatcagtcctgaacgtaccgaagcacgttatgacaaaatacatttatttgatgtacaagttggcgatgctgtgggtggatatcaggaatctcgtttctttgaaccaggaacagacgttgtagtcacatctaccccttttggcaatattggcctaatggtatgttatgacttgcgttttcctgagttagctttaacccttagacagcaaggtgctcatctattaactgctcctgctgcatttacctatacaacaggtcagatgcattggcagcttttgctgcaagcacgtgcaatggatagccaatgctatgttttaggggctgcgcaacaaggttggcatggggaaaaacgccaaacttgggggcatgcaggagcaactgatagtcgtggtcaagttttaagtatgattggttatgaagggaatggtttaattacggtaccttttgatttagctgctcaagaacttgtgcgtacatcaatgcctttaatgatgcatcgtaaattaattcactattaaaagcttaattattcatgtggaaatacttatttagcattttttgcttaggggcaaatattcactgttatgcgactgatttcgggacaacgaataattttgtctctccaaatttgcagcttaaacaaaatgtactacctcctactccaaaaaatattcctctgcctgcttttggccagcggattattggttgggggacaggtgcagaaggtgccagacagcgtttagagaatattcagcctgccgatgtttctatgattaaaaaacaaggaacaactttagaaatgatcacggcctggcaagatttttatgaacaagagcaacaacgtaatgaaaataacccaactgcaaaatatcgtgctcgtttaatgaaaaaaattgccgacctttggtaaccattttaaattagtatttttaagtgatggagtaaagtttagattactccatttttttacgttatcttatttttatcaatagctctaaattatgagcatttaagaaattaaacataaagcgatatactagaaaagcacccattagttttctgaggaatatatggaccaagactgtcaaaatctaaagcttgagaatcaattatgtttcctcatttattcaacaaatttagcccttaatcaactttatcgcaaacttttaactccattagggattacttatcctcaatatttggtgatgttggtgttgtgggaaaaagatgagattactgtttcagaaattggcagcaagttatttttagagtcttcaactttaaccccaattttaaaaaagttagaagcattgcagcttcttaatcgtactcgatcaaaagaagatgaaagacaagtcattatcacgcttagcgaaaaggggaaaaacttaaagaacaggccgtaaatattccaaagcatatcttagaggccagttcttgtgatacggctacccttctcggtctcaaagatcaattaacacaactccgtacaaatatagctaaataatcaccaatttttttacaaaattgacttgttaaaataattaagtcgtgtacgatatatttgcattcaatttaatttaggaataaaaagatgtcattagaaaaagttgtgtatcgtgcaaaagctaaagcaacaggtggccgtgatggtcgtgcaacttcatcagacggtgtattagacgtacaacttggtgtacctaaagaaatgggcggtgctggtggtgccgtaactaacccagaacaattatttgcagctggttattcagcatgctttttaggtgctttaaaatttgttgcaaatcgcgataaattcaatattagcaaagatgcgtatgttgaaggtgaagtcggtattggtccaattccaacaggttttagtattgaagttactttaaatgtttatttaatcggtatggaccgtgaagaagctgaaaagttagttgcagcagctcatatcgtttgtccatattcaaatgcaactcgtaacaatattgatgtgacgtttaatattgtgactgaataagttttaatataaaaaatgcccgaatcatatcgggcattttttatatcttacaaattatgcttcacttgcttcattggttacacgaagcacttcttcaagtgtagttttacctgagagcaccttacgtaaaccatcatcgcgaatagaaccagaatactgacgagcatgattttctaattcaaattcagctgcattaccatgaatgagacggcgcataggttcatcaataggtacaatttcataaatcgctgtacggccattaaaccctaaatgagaacactgatcacacccttgagcctctggtaactttaaacttggttcatggaaaatatgctgaaaaacttgcttctcaaaagtatcggcttcacgccatgtcatacaatgtggacataaagtacgaaccaaacgctgcgcaaccaccccaattaaagagcttgaaagcaggaaaggttcaatccccatatctttaagtcgagtcactgcaccaatagcggtattggtatgtagtgttgataacaccaaatgacctgttaaagatgcctgcaccgcaatttcagcagtttctagatcacgaatctcccccaccatgaccacatctggatcttgacgtaacattgcttttaaagctcgagcaaaagtcatatctactttggtattcacttgagtttggccaataccttcaagctgatactcaattggatcttcggcagttaagatgttacgggtgttgtcatttagatcagataaggcagcatataaagtcgtcgttttccccgaaccagtaggccctgtgaccaaaataataccgtgcggacgatgtactaactgagttaaacgttcatagtcatttgccattaaacctaggtgagtcatattaaggcgacccgcttgtttatcgagtaaacgcatgaccaccctttcaccatgtgacgatggcaaagttgaaacacggacatcgacttcacgaccagcaagacgtaaagaaatacgtccatcttgcggtacacgcttttcagcaatatcgagtttcgccataactttaatacgcgaaacaagtaacggggctagttcacggcgtggctgcacaatttcacgtaattgaccatctacccgtaaacgaactgatagctttttctcaaaggcttcaatatggatatctgaagctccaacacgaattgcctcagagagaagtgcattgattagacgaacaataggcgcgtcatcctcttgatccattaagtcttctgtttcaggcacctgatctgcaaggcttaataaatccggatggtcttctaagcctgcagctacttgttgagattcacctgtatcacctgcataactggtacttaatagactattaaattcttgttcagtgcataattgatagtgtgcaggtttccccaaaattcgtcttgcttcctgcaatgcaattttttctgtattttgacgtctaacaataaaaacttgatcaccgtcataacgaaataaaacaccatgacgcttggcaaaactatatggaacttgtatttgtttcaatatttgcatcacaatttataatgatgagtaagatgattttgagtgtactctaagcagattacagcgtgaagtctgtttaacaactcggtagaggaattttacgtcttgtttgaaaataatgaatatcagcctcacccccagaattctttaaaatggtggggtgaacagcactttgaaattaaccagtccaaagcatggcaattcggttcaatgctctttcgtttaacacgtggcataaaagaatggcgtatcgaatattatcgcccgactctccaagatgataatgagcaagattggcacatcataacggatgcaaattttggttttccacattctgtgcaagttgaacgttatatgtttcggaaaactaatccgaagtttctactcatgccacgtttggcggaccgatcagtggtaattaaaccagttgatccaatctatattccagcgggtcaacgagggacactttatattagtacccccctatggattgccggtttagttgaaagtcagcatgaacctttatttgagattcctgtaattcaacccaaagatacatggtttggtcccaatgcccagcaaggtgaaatttgttatgcaacctctgttgatggtcgtaccgatttaaatctattaaccccacgtgcttttcgtgcagttacgccgattgatttccataataccagtaatcatcaattacgctttgaccgtatgaatgtaccggttactgccctaccgctattttatagtgaaagtacaggacgcttatggacatcacaaatcaaagtctactatgaaggctctgaccgcccagcccgtattcgtattgaaaaccgtactccccctctggcaggtgaagtgacttatgttcacccaccacgttcaccgggtggtgcgctatttaatatgtttgattcattcttttaagggggttttatggccgattcaagtattccaaaagatatcgctgatagcctcaaaagcatatttaccaatatcaataccgaacgaattagtgaaattttagtcggtgttgtgctttgttttattggttttgtccttgcccgtattatttcaaatacatttattagaaccgttggctcacgttttaatgctcaccagcgtctggtatggcgccgcggtattttctattttattttcttactcttcattatgacgagtttaaaagaagccgggttcaaacttagtgtatttctgggggcagcggggatcttaacagtagcactcggtttcgcatcacaaacatctgccagtaacttgattagtggtttatttttgattggtgaaggttcatttgaggtcggtgatacgattcaaattacacttattcgagggaatacaatcgaaggcgaagttatctcaattgatttgctttcggtaaagttacttacactcgacaacgtctatattcgtttaccaaacgaacaactcattcgtgctcctgtacacaacttatcaaaatatccaatacggcgtattccaattactttggcaattaactttcatgaagacattattaaagtccgtgaggttctacttaacgtcgcagcaaattatccactcgtgttagatgatccaaaacctgctgttacagttactgccttcagggagtcatcgattgagcttttatttgcaatgtggtgtcgtcaagaaaactctttaaaagttcgagatgaaatgcaagaacgtatccgaaatggttttttagataaccaaattgagattcctgttccgaaaatgggcttaattgatcgaccatctactgcttttgctgaagatgatatcgatcaatacagcaatcaaaaagagttaaaacgagagcctaaagcttaggctcttgattcttctgtacagaggatgacggtggtaatggcgcaagataagcaataatcaacattaccccacctgctccaataaacgaaatgacccgagttaatgtcgcactttgtgatagatcaagcaaaattagttttaatacaacaatccctaaaagtgcagcgcctacaaaccagagttgacgaatcatttttcgactagagtatgtagtcaaaacaaatgccaatataacccaaagtaacgtcaaacttagctgtactacaccatttgtccaaattgaagcactccatagcggagttgcccagtaatggtgcaagcctctgacgactacactactaaataccagtaagcccactaaaattgttgtaattttaaaagtccattccagcgatttatcttgatcaaaagcatgctgataaataataaagagcagacctgcaaatactacaatagaaagaaaatcagttaagttaaataaaggaacaaagtaaagatattcagcagaatgaacatcaacactcaccacaagcaaccaactgaggcttaaacaccacaccggaatttgatgcaatagtgtcgttttatgagttttataagcccaaagcgaataaatcacaggaacaaaagccaaagcgactattggcatttttgggaaaatagccacgccaactatcgctaacgctaaccagcttaaacccgcccataccttgacgtaacccaaatgacttgactgcggttgagccataataaataagccactaagaataatggtagagactaggaaagtagtttgttgtaatgagtctacccatttaaacaaagtaaatacttgactcgcaaaggcctcccctaaaaccaataacagtaacaggctaattaaaattaactgcaaactttgccattgcacacgaagtttatagtgaacaatcgcactaaatattgctattagagcgatagcaaacatcaaatatggacttaaagcatgatgatgccatgccattatttctacacctgcaacggcgcccgcatacatgcctaagcataagaaaataccgctaaacaggcttgcgctaaaatagcgttgttctttgctgttgtattgcaataaataaaaggctgaaatgaattgggcaattgcataaatgctagtgcttagtgttggaaactcttcatttgcccaaacctgataaaacagtgcaagtgagctaagtaaaactaaaatcacgccaatatatcggcttaaacggtagcgttcagttactccccaaacgattaaagccgttccttgtgcaacccagccaatagcagtccagtgcgccccttttgcgagtggaaaaattaaggcaaaaaaagcaaccgcgagaatgaaaaaactttttgcaaggaccgaaagctggggatgagtttttttaatccagaacgttaacaccgcatagatgcctgctaaaacagcagcaccaattgttaaagcttgggtcgactcatgaactaaataggcatgaagcgtaaagcctagtacaggtacactaaaaataagaccaacatctaagagcggaggtaaacggatcccctcttgtttttcatgttctgaaacccgagagatattttggctataacgaacacttaaccaaataaatagcgctatatggagccataaaatccagtctaatgtgtcaaattttgctggctctgcataaaatacgattgcactaccgccaataaacattgtggcaaagaaagcgatctgatttaggattttccaaggctgaataaaattaaccgcagcgactgcaagattaataacaagatagtaactaaataaaaaaaccacatcaggacgatattgcggaataactaaaggagccgcatacgccatacccagtgcgagtattgccaaataaatagcttgttgttttaaactcaggaatactgtaattgctaataaaatcgtaaatagaatactggctgtagttaggctggtgattacaccaaaatgatgtgagaacacaagcgttagaaagacaacagctaaccctacaccttgcagtgccacagcaaatagctgatttttcttttgcaaggtatatccaaatgctgttaatacacctcctgcaatcgcaataaaaccaagttttacacctaagctcaactgccagtgctcacttgcaaaacgcagtaagagcactaccccaaccataagcacagcaacagcaacccttaaaattggattaccatgaatcatccaatcgactgctggttgccaccatgcggtggtctgcgtacgaactgtttgtttttcttgatttaatgctattgttccaggtaaagctggctcggtaatattgtttggatcaacttgccctaatacaggcgttatcacttctgtatgtatagattcatttacatttactgtttgcttggctgtctcgaggaacaataaacgagtatgaaatgcactgatggtttgaatcaaacataacagtaaaaccagtaatgccccaccagcaatccacatccaatgattgatataagcaactaatgcaaccaaagcggcggtataaattaccgttctttgcatatgaatagaataaagtggcgttgtctggtgagaaaactgttgttctaaatgagttaaacgttgatgcagacttgataatgactgaaccagtatgacagtgaatgcaatagataaagcaacaacggcactctgaaatttaaaaccaattgaaatggctaaaaacaaagtcaaagcgatcaaaacgatgatcattccctgtttgtcttttttatacatgggcttagcaatatgacaccttcattacaaatcatcttacttcaagccaatacatgcgtatatttatacatacaaaatactgcaaaaatcataaacctgcattcatagccgttttcacgtaaaatacccataattcagtttaaggaattgttcaatgccaccatttgtcttggttgatgggtcctattttttatttcgtgcatatcatgcattaccaccattgacgacctctacagggttacataccaatgcaatacgtggagcaatttctgccattcaaaaattgatgcgtcgtatgcaaccgacacatatggctgtcatttttgatacgcctgagccaactttccgtcataagctttcacctatttataaaggtgaccgcccgactatgccggaagaattgtctcaacagattccatatttacatgcattgattaaggctcaagggattcctttatatagtcttccgggtgcagaagccgatgacattatcgggactctcgctaaacgcgccgtaaaagaaggtcatcatgtccttatctcaaccggagataaagacatggcccagctggttaatgactatgtaaaacttgaagatagctttaaagatcgagtgctagacaccgacggcgtatttgaaaaatttggcgtttggccaaaccagattatcgattacttaacccttatgggtgacgcatctgacggcattatgggtgtacctggcgtaggcgcaaagacggctgccaaattactgactgaatatgggacattggataatatcattgccaatgtagaccaacttaaaggcaaactgagccaaaatattaaagataatttagacaatattaagcttgatcaccagttggcaagcattgtctgtgatcttcctttagaactcgactggcatgaattaaaacttactgatccaaatgtagatgccttacgcaatctctatacggagcttgagtttagaaaccagttacagtctctcgatcatccaaacaatccaaatagctcaagctataagcagcaagcttcacaaactattgtccaaaatgaagttaaacctgctcaaacgattgaaacagaagatcaagcaagcttgactagtcaagatgaccagcttggaactgcaaactatcacactgttttaacacaagaagcatgggatcagctctggcaacgcatgcagaatgccgatcattttgctattgatacagagaccacaagtcttgattaccgtattgccgagatggttggtttttcaatcgcatttgatgcaaaagatgcctactatgttcctttggcacataattacgaaaatgcaccacaacaactggaccgtgaacaagttttagcgcaaatcaagcctatacttgaaaatgaagcagttaaaaaaatcggtcatcatcttaaatatgatgcgcacatttttgctaatcacggtattgaacttaaaggttggtatttcgatagcatgctggcatcttatgtactgaatgcagcagctactcgtcatggcatggatgatgttgctcgagtttacctaagccatttgaccactacttttgagcaaattgctggcaaaggtgcaaaacagaagacttttaatcaaattgagattgaagttgcagctcattatgcagctgaagatgctcatgtgacctatcgtttatatgaagtactttcaaataaacttaaagcacatcctgaattagaaaatattttatataacatcgagatgccagttgctcgaatcttatcgggtatggaagaagatggaatccgtttagatcatgctttcttagataaattaagtgttgaatttgcgaaaactatggaagaccttgaaaatcaggccatggaaattgcaggtgaaacttttaatattgcttcgcctaaacaagtaggtgaaattctatttgataagttaggcattaaaggtggtaaaaaaactgcaactgggcaatacagcaccagtgaaagtgttcttgaaaaaattgagcacccattaacggaaattattttagaacaccgtggattagcaaaattaaagagcacctatactgaccgtttaattgagcagtcgcataatgatacccatcgtgtacataccagctatcatcaagcactaacggcaacaggtcgcctatcctcttctgaccctaacttacaaaacattccaattcgtagacagattggccgtcaaatccgtaaagcatttattgcaccggaaggacgagttttgttagcagccgattactcgcaaattgaacttcgtttaatggctcatttttctcaagatgatgccttagttcatgcattccaacatggtcaagatgtacaccgtagaacagcggcagaagtgttaggtattgcaattgaagatgtgaccaatgatcagcgccgtcaggctaaagctgtgaatttcggtctactttacggcatgtccgagtttggtttaattcgtcaacttggctttactcgtgaagaatcgcaaaactatatcaaacaatacttccagcgctatcctggcatttacgaatacatgcaacgtactcgccaagtagcatcggaacaagggtttgttgaaactattttaggtcgccgtctgtatacaccggatattgacgcccgaaatgtgatggtacgtaaagctgctgaacgtgctgcaattaatgcacctttacaaggtagtgctgctgatattattaagttagcaatgattgaagtagataaaatcctgccaaaagatcaagcaaaactattacttcaagttcacgatgaattggtgtttgaagttgattcaaacattgcagatgaactttcaaaacaaattgcggatgtcatgcagtctgttctggaaatttctgtaccgttagtcgtagaagtaggccaaggtaaaaactgggatgatgcccattaatttatcgataaaccaataaaaaagggctgtaatacagccctttttttaatcttacaaaattaaagtccagttaataaaactttagcgacttcattcattaagatctcggcaatatagagtgccaaaaatgccagaattggagataagtcaatcatccccatattaggcaataaacgacggaatggggcgagtaacggttcagctaaatcttgaatcacctcaatataaggtgaacgagattgagtaaacataacgacccaactcaaaatgattgttgcaaaaattaagtaacggcagaaacgaatcaaatcctgaatcatggtcacaaaagtcagaatcactaaatgaaccggactatttggcatggaacccgaaagatacattacaccgaaaattttcagtaaatataaaataattaaaagaaccaacgctgccagattgaatcggccttttgcgaccgttggaaaaattcggccaaaaatatcaacaatcttagtcgcctttactgtcgataaaaccacaggattataaggacttactgccgccaattgcattaaaaaacggaaaaagaccaataaaatcgcgacgttaattaaaattccaaaaattagcgcagaatttgcacccatagttgtcttatcctattaaagctattttgcactgtcactcagttcttgagccaattcttggctacgtttctgtgcagcagctaatgcagattgaatattttgagagatttgtgcacgatcaaaaacttcaagtgcagcttgggttgtaccattcggtgacgtcacatttttacgcagctcagacggagtatttgaactcgtaattgccatttgagctgcacctaatgctgtttgaagagttaaagcagttgcaactttttcatccaagcctaaatttttacctgcacgaatcatactttccatgaggtagaagaaataagctgggcctgaacctgaaactgccgttaccgcatcaatttgagcttcggagtttacccaaattgttaaaccagttgctgctaaaatctgactcgttaattcacggtccgaggcaccaaccacatcagtcgcgtaaataccatgagcaccagtttgaactaatgcaggtgtatttggcataactcgcacaatacgttcactatcaatcaaatttgatattgtcttaatttccgcaccggcaataattgaaataaccaatttatccgataataaaccttttaacggacgtagaacatttgccagaacttgtggttttacagcaagaacaactacatcggcattctggatagcagccgtattatcttgagttacatgaacttctttttcttgcaatagttgacgaatttgttcgacaggatctgaaacggtaatacgtgttggtggtaatcctcttgaaatgagcccgccaattaatgcttgggccatattaccaccaccaataaaacagatattacaattcactgctgttgccataactatattcgccatttaccagattacaagaatgagaaattaaatctggttgccaccctccttcctcacaatatggagactgagccaaccaaaatcctttcggtgtaaaaaccccaagcataacattatctaagactaatatttgaattgtatgacgaagccaaggcaaaatatgtgcttcttgaattgctttttttaaaggccattgcccaacacgaccatataggtgaatcttttccccaccttgacgtcgaatgatttttaattttttattcaataaagaatgacttaaaccaatttttttacactcaacatggaatagtccagctgcgccctgccatctttcttctaatttaaatgaatgctctagttcagcatcaaccggatttaaagtttcagcgaaataaatctgtttactcaacctatagagtatattttgataacggacatagtaaaactggttccaatgtaaagcggcttgagcatctgacttagactcaataacttctgttcttagccgttcgaccatttcaaatgcaggtcgatattgcccttggcctttcatccacgcagaaagtaactggcgctgccgcgcaaaagataactcggataatttcgttagatctaaatagtcagctgaaccagaatattgccaatcatctttaagaacttcttctaaaacttcagaagcatcttgcatcagataactggttcggctcaaagcttgctgcatttttggaaaacggcttgttaaaaatggccacagtgcttcacgacaccacaccctatcgtaatgggtgtcatagttcattggatcatcaatatatttaacttcaagctgagcggtccataaagcgatttgctcacgtgttaaatccaaaaaggggcgccaaattgtcatatctttacggtaatcaatagcctgcatcgcagcaagcccatctactcccgcacctgacaataatcgcaaaataactgtttctgcctgatcttgttgatgatgagcaagcaacagaatttcattttcttgtaaatgttgctgatatgcttgataacgtgcttgacgtgcttgagcttccagattgccgtttgcaatctgaactttttgaataatataaggaatatttaatattgttgcctgtgtggcaaccacttccgcccactctgcactttgatcttgcagttgatgatcaatataaattgctcggatcttttgagggaaaatttgagccattaaatgtagtagtagcattgaatccatgccaccactacatccaataagaaaagaacttttttcagagaactcttgagcttgctttaagacgccacgcctaaattttcgctgccaaacttcattaaacgttgataacgtgcttcgcatcgttcatttgcatccattggtagcaattcatccaaagcctgctttaaaactacttttaagttttgcatcacacgctcaggatctaaatgcgcaccttcaccttcatctactacgtattcaacaatacctagcgattgtagtttatctgctgttaaacctaaagcttcactcgcttgagctgctttctcagcagttttccacaaaatagatgcacagccttcaggcgaaatcacagaataaatactatgtgacaacataattactctgtcagcaacaccaatacctaaagcaccaccagaaccaccttcaccaagtactgttgcgattacaggtactttcaggcttgaaagttgagcaaggctagtcgcaattgcttctgcctgaccacgttcttcagcaccaacacccggatatgcgcccatagtatcaataaaggtgaaaactggtagattgaaacgctcagccatatctaaaagacgctgagatttacgataaccttctgggttacacataccaaagttgtgctttaatttttcacgggtactacgaccacggtgttgtccaatgaccatcacaggttgaccgtcaaaacgagcaagaccacctaccatcgcaccatcgtcaccaaacaaacgatcaccatgcaatgcatcaaactctgtaaagatttcaccgacataatctagaaactgcggacgttcaggatgacgtgcaatttgaaccgttgtccacgctttggactgagtagcttttttcataggtcgaatattatccctttaatcgataaatttttccgactgaatattcaattcaatgtcccaatgcttaaactgctcttgctcatcatgcaagtcggcaactaacaatggccattgtttggcatcaccagaaacactaagttgccattgttgatcatttatgatggtcaattcaatggcaggaagcatctgatcactgcggctatggttgagtaaaactgctaggcgaagtaacaaacttaaataaactaatttatgaccgccagcctttaaaacttcattttttacatcatttcgcaatttacggcggtgatgagcaaccaaatgtgaaagatgattttggtcaatttgtgagaaaccaggaatatcggaatgttgcaataaataagcaccatgacgatgatagccaccatgactaatcgctaaaccaatttcatgcaaatatgctgcacggcgcagtaagtcactgtcttcactcgttaaattaagtggtttagcaacactatcaaataagtattgagccgtatttacaactcgttctgcctgtttcggatcggcgttataacgtcccattaatgcttgtacactacggtcgcggatatcctcatgcttaaaacggcctaacaggtcatacatgactccttcacgtaatgcaccatcagaatatgccaaacgttcaatttctaaaacttcaaaaacagcgtacaaaattgccaatccggctggcaaaactgctcgtcggtcttctcgaagtccttcaaaatcaatttcagaaatatttttgaacttaagtaacttatctttaagtttatggagaccttcacgtgtgacattttcttgctcgtcacttagccccatattcaccataatctggcggcaagctttaatggtcccacttgaacctacaacagtatcccacccttccatcttataagtggtggcgattgctgaaagctctttacgcgcagcaacaactgctttatcaaatgctttttgtgtgatttcaccatcggcaaaataggcttttgtataggctacacaacccatctgtaatgattcagtataaattggctcaaattcttcgccaataataaactcggtagatccaccaccaatgtcaaccactaagcggcgtcctccattggccatcgtatgtgatacaccaagataaatcaggcgtgcttcttcacggcctgcaataatttcaataggtttaggtaaaatttcagcagctttttgaatgaactcatgtccatttttagcctgacgcaaagcgttcgtcgccacaattcttaaacggttaggttgaactgagcctaaacgcccaacaaaacgagccaaacaggctaaaccacgttgctgtgctgcttctgttaagtttttattttcatcaagaccagctgcaagctgtactttttctgacattgaagccacttttttaacttcaccgtgatctacccgtgcaatggcaaggtgaaaactgttcgaccccatatctatggcagcaagtaattcttcatcaatcagaaagtcagacattattgaactaaacccataacaattcacgcctagagtaattcacaagaatgcaattgaaaagccattttcatcaacaattaatagcgtttgatatttttctatttgttaaacgattgtacaagccgatgatgaatatcgtgagcatccattagacaaatttacttaagccttgaataatagcatcaaacccttacattgaactaagtagctatgtaatactgatagagattatctcctcctatagtgatagcacttttttctaaaaattggagccgtaccatgtctgcgactattgtaaatacaactgatgataacttccaagcagatgttctagatgctgaaacacctgtacttgttgacttttgggcaggttggtgtgcaccttgtaaagcaattgcacctgttcttgaagatttatcaagtgaatatgcgggtaaagtaaaaatcgttaaagttgacgtgacttcttgtgaagagacggcagtgaaatacaatatccgtaatattcctgctctattacttttcaaaaatggtgaagtagtagctcagcaaatcggcgctgtgcctcgttctaaactcgttagcttcattgacgaaaacgtttaagacgtaacgttacagatgaaaatacgctatacctttatagcgtatttttttcggctataaattgacaaattagctgatctcacttatattgcatgctcaagaggcactgaagggaatcgtcttctgtccggcttcttacaagatacaaacataaagatcgccactcggcaacagaaattgttttttcacatttctcttcgaaacagttaatcagacttctgaattgttattgtgtaaatacaattgcgatactcttttttgtatgcgagcgatttttcttctttttaaaccacactctactctttcctaattctgacccttatgaacttaactgaactcaagaaaaaaccaatcggcgaactaattaaaattgctgaatttatgggccttgaaggtatggctcgtaaccgaaagcaagatattatctttgccatcttgaaacgccatgcgatgaatggcgaagaaatttttggtgacggcgttcttgaaattctctctgatggttttggttttttgcgctctgccgcaggttcgtatttagctggtccggatgatatttatgtgagtccttcacaaatccgacgctttaacttgcgtacaggtgacaccatcacaggtaccattcgtccaccaaaagaaggtgagcgttattttgctttgctcaaagttaatcaaattaactatgacacgccagaaaattctcgtaataaaatcttatttgaaaacttaactccacttttcccgaccgaacaactggttatggaacttggtaatggtacaacagaagacttgaccgcgcgtgtagtcgatttagttgcaccaatcggtaaaggtcaacgttctattattgtcgctccgccaaaagcgggtaaaacaatgttacttcaaaacattgctcaatctattgtgagaaacaatccggaagttttccttattgttttattaattgatgagcgcccagaagaagtaactgagatggagcgtaccgtacgcggtgaagtcgttgcttcaacatttgatgaagcaccagcacgtcacgtacaagttgcagaaatggtcattgaaaaagcaaaacgtcttgttgagcacaaaaaagacgttgtgattttacttgactccattacacgtttagcccgtgcatacaacacagtaattccttcatcaggtaaagtattaactggtggtgtggatgcacatgctttagaacgtccaaaacgtttcttcggtgctgctcgtaatatcgaagaaggcggttctttaacaatcatctctactgctcttattgagactggcagtaaaatggatgatgtcatttacgaagagtttaaaggtacaggtaaccaagaaattacacttgatcgccgtattgctgaaaaacgcgtcttccctgccatgaatattaagaaatctggcacacgtcgtgaagaacgtttaatggatgaagataaattacgtaaagtttggattctccgcaaacttcttcaccctatggatgagttggcagctatggagttcttacttgatcgtatgaaagaaaccaaaacaaatgatgatttctttgatcagatgaaacgtaaagcttcaacataatcatattatttattctaaaaaggccgctctattgagtggccttttttatttggttgacaagctttacacaaaaatacattttgctgatttttatgtaaaattatttataagtttttgaaaacaaatatttttaatataaaaaagccatgttttttagtagcttacttataccttttccaatatatctcagctgattaattgtttttttctgttaaaaaacaggcttttttcactcttttcccgatcttttttgacagccaacagtagtatttcaacatttgcagtgatagcatagcggcagaccagttagactgctccatgcgttgttacctagctacgttttaggaataataaaagcaaaacagtccaacttaggtttttttaatctcaaatcttttttgtgagagtgatgccatgttattcaaaaaatttgctgttgctgctgctgttgctgctactttagctttcgttggttgttctaagaaagaagaagctccagctgctggtgctgcatctgaagctgtagctgctgcttctgaagctactgctgctgcttctgaagctgctgtagctgttgacgctgctgcttctgaaactgctgctgctgcttctgacgttgctgctgctgcttctgacgttgctgcttctgctgcacactaatctacactctagattagctaaaaaagaggacattttgtcctcttttttatggctaaattttatgtttagacatcaaatagatttgatgtattaatggctaagtatacttttctaatattaagaaaaatttattctaggtttatttaaaattataaataaaaaaagcagatcaatcgatctgctcatttccaacgcgttgtctaaatttctgacccgctctgaaggtaactacacggcgtgcagaaatcggaatttcttcgccagttttcggattacgtcctggacgctcgcgtttatctctaagctcgaaattaccgaaaccagaaagcttaacctgctcgcccgcaataagcgcttggctaatttcgtcaaagaacaactcgaccatttgttttgcttcacggcgatttaagctggttaactcacttaaatgatcagccatgtctgctttagttagtgctgtcatgaggccctcaatgtcgcttgataagtgttttccaacacttggattatattgtccataccagatttaatttcagcatcttcaagcgtacgtgaaggatgttgccataataacgcaaacgctaatgagcgtttaccttcttcgacaccctgccccgtatacacatcgaataaccaagtagagtctaaaagctctccaccagttttttcgattaactgctgaatatctctaacatttatattatcagagattaaaagcgcaatatcacgtctaaccgaaggaaaacgtgataattctgtaaaattagatacataagattgcaaaacagcagcctgatcaagctcggcaacccaagttgtgctcaaatctagttcgttttctaaagatggatgcaagcggcccaagtaaccaattgattggccatcaactaagatttcagcagattgccctggatgcaaccatggacgctctgaacgtacatactcaactttgacacgtccagcagctaaaatctcttctacttcacctttaaaatcgaagaaatccattggctgtggcttagcatgccatgattcaggttcacgagaacctacggcaactaaagccaatgtaggaatttgcttcagatcctgaatagaattagcattttgataatcaaaacgtaaacctagttcaaagaaacgtacacggctttgctgacggtttaaattatattgtacacaagggattaaactcgaaagcaatgtgctgcgcattacagccaaatcactagagattggatttgccaacattaacggacttacttgcgggttcaattgcttttcaagttttgcatcagcaaagctaaagctaatcgcttcttgataccctaaagtgactaccgtttgacgtaactgcgcgatttcaaaacgatcttggtacttagcaagttgaacatccatacttggtaagctgatctgaatattgtcataaccatcaatacgtgcaacttcttcaatcaaatcttgataaattgccatatcgtagcgatgtgatggtggaactacgctccattcaccattcgcttgaacagtgacttcacaacctaatcgagttaatgcatctgtaatgaactctgccgctactttgtaacccaacaactggtctacttgagcttgcttaagttcaatcgcttcacgtttcggaagtaaatcagatttttcaactacagtaattggaccgaactcaccacccgccaactcttgaataagctgagaagcacggttcatcgcaattaatggtaattcaaaatctacaccgcgttcataacgttgtgaagaatctgtatgtaaaccaaagcgacgagcacgtccagcaatcgcaagcggagcaaaaaatgcgctttccaagaagatatcagtcgtatcatcagttacgcttgatgctagaccacccatgatcccagcgattgctagtgctttttggtcatctgcaataaccatcacatcatcttgtagttcaacttcttgatcatttaaaagctgtaacttttcttgtggctgagcttggcgaacatgtacagtcccttcgattttagctaaatcgaaagcatgcattggctgacccaattccatgaggacgtaattcgttacatcaactaaaatactatgagtacgaattcctgaacgtgctaaagcctgttccatccattcaggggtcgcagctttaacatttacatttttaatgacacgtcctaagtagcgtggagcaccatccgtgttgatgactacttttttctcatcagtaattgtcgcatcaactgatttgatttcaggctcattcatttgcagttggttaatcactgcaacttcacgtgcgataccacgaatactaaagcagtcaccacggtttggtgtaatactaatatcgatgacattatcatcaagttttaagtattcacgaatgtttacccctactggagcatcatcaggtaactcaagtaaaccatcgattttatcttcaaggtcaatttcagaggcaccgcacagcatgccttgtgactcaacaccacgaagcttaccttttttgattttaaaatcacccggtaatattgcaccaatagttgccacaggtgctttcattccagcacgaacgttaggagcaccacatacaatttgtaaaggctcacctgaaccaatattcactgttgttacacgcagacggtctgcatcagggtgctgttcaactgttagaacttcaccaactacaacgccagtaaatggcttagcaacaggtgccagctcatctacttcaagaccaagcatagtcaactgatcagataatgtatcgctatcaattgctgggttaacccatgtgcgtaaccaattttcgctaatcttcatctttataaaaccttatttaatcctgaaaaaatgttaggcaaattggcgtaagaaacgcacatcattttgatagaacatacgcaagtcattaatgccataacgcaacattgcaaaacgttctacccctaaaccaaaagcaaagcctttatatttatcaggatcaatccccgcagcacgcaatacatttggatgtaccatgccacagcctaatacttctaaccaacgtccacgctcatccatgatatccacttccgcactaggctctgtaaatgggaaatatgatggacggaaacgtacttttaaatctttctcaaaaaattcattcagtaggttaattaataaaccttttaattcagcaaagctggtgttctcagcaacgtacaaaccttcaatttgatggaacattggcgaatgcgtttggtctgagtcgcagcggtatacacggcctggacagacaatacgaattggcggctggcttgtttccatggtacgaatttgcacaccagaagtatgcgtacgcaacaaatggtttgcatcgaaatagaaagtatcatgcatagcacgtgcaggatggtgcccaggaatatttaatgcttcgaagttatgatagtcatcttcaacttctggtcctgtagcaaccgtaaagccagctttagtaaagaactggcaaatacgttcttgcacttgagtaacaggatgaactgtaccaacgcgctgtccacggcctggcaaagtaatatcaatggtttcacttgctaatttttgcgccagtgcagcttgttgtaatgctgtttgacgctcagttaaagcgttattaattgtttctcgaacagcatgaatcgcagcaccttgtactttacgttcttcagggtccattttccctaatgctttcgattgttctgcaagctggctttttttccctgtaaattgcacacgcacctgatcaagtgcaacaaggtcttgagctgctgcaatggcagcaagcgcttctgtggtcagggcttccagtgacatagtaactctcaaagcaacaaatttaaaaatataataaaacactgcattctaacagtttttcaccgtattgatgaagtttatccatcatgaaaaatgtattaggcaacaaaaagataaaacgtataaaataatagcatcgtcaatgagatcaattattatggcgcttaatcagatttggaaacaacaacttacacttgtgacctatggtaacgaatacctacgtcagaatttaagttttagccaatggcgacaacatcatatttttgaccaacatagttttcaatttcgtgacttaatttcacaacatttacttgctcaacatttccaagtttggttagaagcactcaaaaaacagggaacaacccagatctctcttcacttatcaacaatcttaaatgaagagcaaaatccaaataataatgtcgaacttttaccttatgctcattttattgtaagtcatcaaaacaataagaaaatcgcatggatttttggacatgagcttgccgaatggtacagcaacgataacgagtttgagccgcctctgactcaacgcagcgatttacgcttagagactttctggcgttttgaattgaatgaaaaattatctaagaaagttgaagctgacttaaaagcacctcaatgggacgaaatttcagactttatggaaactgagttatttcgaagtaagtatgcagcaggttttgaagaaccagaatttcagaaaaaatattttgatgggtcaacacatcaaatttcggtagagcatcaaccaactcttgctcttattcctgaaagctacccagcagattgtgcacatcaactcctctaccgcactcaggctttatcagattatttagagcagaaaaaacgcaccgcaaatgatcctttaggggaagacttagaccaagaacaaattattaacttaagaaactttacccacaaaactgacgacctatttgcaaaacttattgtgaaagcagcaaatcattatcaaacagctcaattaaaacctgttgagaaaccttctccttttgatacaacgaatgagtccgcaactcatttaaaagcacctcatcataaggctggaggaacaggggtaatcaagcttattgttctgacaataattatttgtgctttagcctattattttggtctttaatcaagattaaagttgccattcataaaatagttctgttattccaaggccgaactctggtagttcggcttcaccagttaatttggctcccattttttcatagaagaagcgacttggatttttattaaaaacttctaaacgaataaaagcataaccttgatttaaagcgcattgatagaacttttggaataacgcacgccctactccttttctttgaatttctcgtaataaataaaaagcacgaatttcagcaatattattttccggatttaaataaccatcgagaaagcctttcactactccattttcagtatagataaataacttatgatcaggacttctacttatctctttccataactgttgtttatctagtacgttaagctcattcaatatttcttgcttaatcatacctgtataggtttctttccaactctgtacatgtacttctgcaatagacaatgcatccttaaatgatgctatacgaatatctgtgtcatttaatggtttcaattcacttccctcatgtcactactttttagagtgaagcattaattcgtctcgtactaacctactcagttaaaagtaactctcgaacatgtattaaagcaaaacccaacaaatttagtccttgccatagagatggatcttgaatgtgtggatggtcttgcgccataccaacaccccaaattttatcgactggagatgcttcaaccaaaatacggtcttttgttgctaataagaatttttttaactccggatgctgtgagaatttagcaaaattcgcctgcaccactatgtcaaaacgtttttcttgccatatctgttcattataattacgtactttacggcctaattgcttcgcttcattcggatgtttaacctgcaaaatctgtgcaaaaatttctttatcattaaataattttgctttttgcgccatcatatagtgctcagcagtaaagtattcaataccttctacattaaattgcgcaggaaaccactggctaaaacagcttttatcaataagattagctttcttaggagtatgtccccagaaatataaatatttgaactggtgaccttgctgtattttttgaattaagtcatttagaaatttttcgtctttcatcatttatctctgattattttcttttttaaaatagaaccactaaaaataaaaaagaccgctaaaaagcggtctttttttgaatctctaagcttatgcagctaatgcgcctttagctttttcagctaaagcagcaaatgctactgcatcatgcatagcgatgtcagctaatacgcgacggtcgatgatcacttgagcttttttcaagccatcgatcatacggctgtaagacaaaccgttttgacgagcaccagcgttgatacgcgcaatccatagagcacggaattgacgtttcttctgacgacggtcacggtaagcgtattgaccagctttgattaccgcttggaacgctacgcggtaaacgcgtgaacgagcaccgtagtaacctttagcgcgagcaagaatttttttgtgacggcgatgagccactacaccacgttttacacgagccatttataatctccttagatgtatgggcacatacgacgaactgaagcaacgtcacttacgtgaaccattacacagccgcgcaattgacggatacgcttagcagattttttggtcaaaatgtggcgcttgaatgcttgtttgcgcttaaaaccgtttgcagtcgctttgaagcgtttagctgcaccacggcgagtttttaacttagccatagtaacctcttttgggcacctgttcggcacgattgcaccattgcaaaatcgacctgcaggtaaggaagcgcgtattttatagtatgctgactaaaattaaaactattcctagaatttttttaaattaatccctttagaaatgagaaaaacctatctcttttttagatgaatataatcggcaataatttcagcatcgctgcttatttacccctataatatgagcaaattatcaacatacgatatttcaaatgcagaaacatgatgcattcgctgccctgcgctatagagatttctcaattgtcaccattaatcaattttgcttaacattagcaattttgattcaagaaattattgttgcctattcactttatcaaattaccaaagaccctctaactttaggtttaattggactagcagaagccattccatttattgccctatcgctttggggtggttattttgctgataaatttaataaacaggtcatcatgaaaatctgtttatttttctcagtacctcttcctttagttttatggttactgttccatctgcatgggttgggtcatatcagtgtaaatttcctttcttggggcatttatgcggttatttttggtttgggcaccatacgtggtttttacaacccttctgctacatccctaaaaccatttttaattccacgtgagctttatgcaaatggtgcaacatggacaaccattggttggcagagtggtgtaattattgggcctatgctcggtgggttcatgctcgcttatttaggcagagaaaccagtctttttagtgttgccggtctacttactatctgctttattctcattaatttattacataaacgtagctttcctaaaattgaaactgccaatgttctagaaagcttaggcgatggctttcgctttatttggaaaaccaaaatagttctttgggcgatttctttagaccttgcctctgttttatttggtggtgtaatcgctctactccctatttttgccgaagatattttaaaagtcggtcctgaaggcttgggttacttgcgtgcagctccttctattggtgcgctcattactatgattgctttaactcgttttccgccaactcagcacgcatggcgtaatatgctacttgcagttgcagggtttggtgtatttacaatccttttcgcgttctcgaacaacatgtggttatcactatttgcgttggcgatgacgggtgcttgcgacagtatttcggtggtagttagacaaaccattttgcaaatattcccaccagaaaatatgcgtggtcgcgtagcggctgtaaatggaatgtttgtctcatcaagtaatgagctgggtgcatttgaatcaggcttggctgccaaatatttgggaactattgcagcgactatttttggtggttgtatgactcttgcagtagtaaccttctgttggctaaaaaccaatgatctttttaaagtcgatattactaaaagctcagaagattagttaaatcattttaataaagcatcttcggatgcttttattttaaataaaacctgtaattacccaataaatgaaaatataacgcccagccttagcgataaggaccataaataaaaagcgccaaaaattttctttgaataagccagcaaccaaagtaatagggtcaccaatcacaggtgtccaacttaaaagcagcgaataaaagccatatttatgataaaagcgttgggcttgttctaaacgtttttcagaaaccgggaaccattttttatgtttaaactgttctatttttaaacctaaccaccagtttatacatgagcccaatacatttccgaaagtagcaatcaaaatgagaagaaaagctgaatgttgattttttaataataaagcagcaagtacagcttctgattgtagcggtaataaggtagccgccccaaaagcactcaaaaaaagtaaaaagtaacttagcatattaaattagaccaaatcacctttcaccttattcattaccctaccaataaacttagatgactttaattgataatgctttttgtactgcagggcgtgctgttaagcgaacaatgtattcttgtacatacgggtaatcctctaattgaatcccctgccattcataacgcaaaatccaaggtagaattgccatatcagcaattgagtattcccctgcaacaaacttctgaccaatgagctgtttattcaacacaccatataaacgcttagtctcatttacatagcggtctatagcatagggaattttctctggcgcaaagcggttaaaatgatgattttgtcctaacataggacctaaaccacccatttgccacataagccattgttccacttcaactcgctcttgctcgtctttcgggtagaacaatccagtttttcgtcctaaatactgcaagatcgcgcctgattcaaatactgaaattggctcaccacgtggaccatcttggtcaacaatggcaggaattttattattcggagaaattttcaggaagtctggttgaaattgatcattttctaaaatattaattgggtaaagggtgtaatccagtcccatttcttctaaggcaattgtgattttatgtccattgggtgtgccccaataatatagatcaatcattctattttcctattcatcgttatcatgactgcgtcttgcgttatatcatgttttgggtaatacaatgatatttccaacaccaaaaaacacataaaaattgagaataactttggattaaaacgatattaaacgtcagtttaagaaaatagggctaaaagacgagaggcataaaaaagcactgcttttgcagtgctttttttgagtgttactttttctttttcggtccaagtaacatacccatttgtcgaccttccattttcggtgcttgctctacaacccctaactcagctacgtctgcttcaattttttgcaattgagctaaaccaagttgttggtgagccatttcacgaccacggaaacgtaaggtgatcttaactttgttgccttcttcaaggaacttcagaatagcacgaagcttaacttgataatcacctacatcagttgctgggcgtagtttgatttccttcacttgcacttgatgctgttttttcttggcatctttttgcttctgtttcaggtcaaacaagtgcttgttgtaatccatgattttacaaacaggcggctcagcgtttgcgacaatctcaacaaggtcaagatctgcatcctcagcagcacgcagtgcttcatttaatgaaacaattcctttttgctcaccatcagcaccgacaaggcgtacttcttttgcacggatctcatcgttaattgctggacggttactctttgcaccttgttgttggttacggtcaggctgtttaatctttcttactccacaatataccggccacgttcggcgacggcagatttcactaagtcaatgaaagcatccactgacatagtacctaaattttttcctgagcgagtacgtacattcactgtaccttcttcaacttctcgatcaccaagaactaacaggtaaggaatgcgctctagagtacgctcacgaatcttaaatccgattttttcatttctcaagtcagaaatagcacgaagaccattttccttgagttttgccacaacttgctcacttgcttcagcttgagaatcagtaatattcatgacacatgcttgtacaggtgatagccaaggcggcataaaaccagcgtagtgttcaattagtataccaataaaacgctcaaaactaccaagaattgcacggtgcaacatgacaggttgatcacgctcgttttcttcagttacataagaagcatctaaacgaactggcaagttgaagtcacactgaatggtaccacattgccatacacgaccaagacagtcttttaaagagaactcaatctttggaccatagaatgcgccttcacccggctgcaattcccattcaagaccagctgcatctaaagcatctgccaaagatttttcagctaaatcccaaagtgcatcatcccctacacgcttttctgggcgagtagataatttcatttgaacttcttcaaagccaaagtctttataaacatctaaagtgagtttaataaagtctgcaacttctttaccgatctgttctttagtacagaagatatgcgcatcatcttgagtaaaaccacgaacacgcataataccgtgtaaagaaccagatggctcattacggtgacaagaaccaaactcagctaaacgaattggtaaatcacggtaagactttaatccttggttaaacacttgaacgtgacaaggacagttcattggttttacagcatagttacgactttcagaatgagtcgtaaacatgttttctgcatagtttgccgcatgaccagatttctcccaaagcgtaaaatctacgatttgcggagttttgatttcttggtaaccattgtcttgctgaactttacgcatgtactgttctagtacttgataaatagtccagccatttgcatgccagaacaccatacccggtgcttcttcttgcatatggaataagtctaatgctttaccaattttacggtgatcacgcttttcagcttcttcaatacgcttgatgtaagctgctaactgttttttatcagcccaggcagtaccatagatacgttgaagctgttcattcttcgcatcaccacgccagtaagcaccagagattttagtaagcttgaatgattttaagaattttgtgttcggtacgtgcggaccacgacacatatctacatattcttggtggtagtacaagcccattgctttttcttcaggcatgtcttccacaagacgtaatttatattcttcgccgcggtcagtgaatactttgatgacttcatcacgcggtgtcatttttttgataacgtcataatcttgatcgatgagctttttcatacgctcttcaatcgctgccatatcatctagtgtaaaaggacgtggcatccagatatcgtaatagaaaccttcttcgatgaccggaccaatcaccatttttgcttcagggaaaagctgttttactgcgtgccctacaaggtgtgcacaagagtggcgaatgatctcaagaccttcttcatcttttggagtgataatttgtaaggtcgagtcttcggtaattaagtcacatgcatcaactaagcgatcatttactcgtccagcaacggtattttttgctaaaccaggcccaatactttgagcgacttccataacagatacagggtgatcaaaactcttttgatcgccatttggcaatgtgataattggcataaaaaaatccttaaggagtgatgccctatacgaaggagcatttcaccgcgagattatgatcgaggcaagcctcaaaatataaaaacggtgtaaatcaaaattaaaaaacctgaaagattttacacttgttcaagccaagtgaaaacctttgtactcataaaatcataaatacattttgcttatacggtaaacagcaataaatgactttaataaagacctagctaaattttcagaaatacataaataggataattattcatcagaactgatttaagatgttgaaaatagcatttctgctcattttctgactgggaggtatttctctttaagactaaagcattaatgctttgattactattaagccatattttcaaagaatgaattaaaaaatagaacacggagttgtttcacatggttagtgcctataacgaattaccacgcacacccgcaaactttgttgcgttatcccctttgcgctatttagagcgcgcagcttatatctacccagaccaagcttctattattcatggcaaccgtcagatttcatggaaacaaacttatcagcgctgccgtcaatttgcatctcagcttcaacaattaggcatagttaaaaatgatacggtttcagttttactgccaaatgtaccagcaatgattgaagcacattttgctgtaccaatggcgggtgctgttcttaataccctaaatacccgtttagacgctaaaaccatcgcttttatgctagagcatgctgaaactaaagtacttttagttgaccccgagtttgttaatttagcaagagaagctttatcgctcattcctaaccaacatattattgtgattgatgttgcggatgaagagtatgaaggcgaaaaccaattccttggttctttcgaatatgaggaatggttagctcaaggcgatgccaattttgaatggcaattacctgaagatgagtgggatgcaattagtttaaattatacctctggaaccactggaaatcctaaaggagtggtttatcaccaccgaggtgcatatttaaatgcagcaagcaatattttagcctgtggtatgaaaccccgtgctgtttatttatggacacttcctctttttcactgtaatggttggtgctttgcatggagtattgcagccagtggcggaaccaatatttgtctacgtaaagttgacccagaactggtgatgcagcttattgcaaaacataaggttgattacttctgtggcgctccaatcgtcctatctatgattattaatctgcctaaggaaaagcagccaagcatagaacatcatgttgaagttatggtggcaggtgctgctccacctgtcgctgtcattgaaggtatgcgaaatattgggattaatgtcaaccatgtgtatggtttaaccgaaacctatggaccatctgcgctttgtgcttctcaagcgggatggagcgacctctccattaccgagcaagcgcaactacactctcgtcagggtgtaccttatcctttacaagatagtatgcgggtgttagatcctgaaacgatgcagccagttccaaatgacggtgaaaccatgggagaaatcatgttccgtggcaatattgtcatgaaaggatatttaaaaaatccaaaggcaactgaggaagcttttgcaggtggctggttccacacgggtgacctagctgtttgccatccagatggttatgcaaaaattactgatcgctctaaagatattattatttcaggtggagaaaatatttcatctttagaagtcgaagacgttttatataaacacccagcagttttaacagccgctgttgtggcaaaacctgacgaacgttggcaagaagtaccatgtgcatttattgaattaaaaactggggctagtgtcacgcctgaagaaattattgagcattgtcaaaaagaacttgcgcgctttaaagttcctaaagatgtggtgattactgaaattccaaaaacctcaacaggtaaattgcaaaaattcatcttgcgtgaatgggcaaaagaacgcgcttaatctgaattctataaaaataaaaaagcggcgtatctaacgccgctttttattaaaaactgtattaaccttgatctgacaatagagcaacctgttgtacatagttaataaatttcattttagttgcttcaagatctgcttctgcaacttgctgggttttatcacgattaattcttaagacatgctggcgtaaagtatgtcgttctgatgcattatagattttgctaaactcattgattgcagggtcaccctgctcgatcatacgatctacccaacgcatgagttgagcttgtttcttcgcgccttgctgaggggtcaaataagataaaatgactgtctcatcttcattgcgcaagagtttaccaacacgctgaaactgacgacggcgcgcttcgaacgaactaatattctgaacttccaaaagagcatcaattaaacgctcatcaacaggaagtttttgaatttgtttgatagaaagttgtgctaactgctcacctaaagcagccatacgttgaactgcttttttctgttcggttttacttgcacgtccttctaaagaatcaaaatcttcttcagtataacgcttgggacgacgtgccacgattaatctgcctcataaaattttgcggcgaataacgcctgtacttcatttaatgcctgttcttcgtcagtgccatcaatgactaaacgtaaagtagtccctttacctgcacctaacatcagtaacgacataatattctttgcatctactaaatgatcgcccttaccaatttgaattgacgaacgaaactttgtagtgacctctatcagttttcctgatgcacgtgcatgtaaaccgagtttattaattacatcaacagttgtgtctatcatgaccagtgcttcatttctctgtgtaagacctgaacagaccattctgcctcaagtgcttgttttagtctatctaccatataaactgaacgatgctggccgcctgtgcaacctattgaaatcgtcatatagtgacgatgcccttcagcaaatgccggcagccatttttttaagaagtggagaatgtcctcaaacatttcatttgcttgtggacttgcttctaaaaattgtttaactggctcgtctaaaccagaaaagcggcgtaattctaaatcccaatgcggatttggtaaatgccgtacgtcaaaaacatagtcggcatctaaaggaatgccatgtttataaccaaatgactgcaatataacaattagattatctgattgtcctaattttgatagcaagatatgttttaaatcgtgaacacttttatctgtggtatcaatgtgaacagtggcacgaaactgaattggaatcagcaactgcttttcttcatgaatacactgtaaaaggcttttgaaacgatttgctaacggatgtggacgacgtgaagcactaaatcgtgcaatcaaatcttgatcttgtgtcgtcagataaatcacatcaaccgtaccatgtttttgtaattgctcaaaaacatggtcgaactcttgcatatctgcccgagtacttcgtacatccacccctaaagcaagctgctcaagattattttcatgatctagctttgccacgatctcaggcagcaatgccaaaggtaaattatcaatacagtagtagcccaaatcttctaatacttgaagagctgaagattttcctgaaccagactgtcctgtcacgataagtatacgcttcatggcatggctgtccttttatatattattgaggtgtaaaggcaacttgtagattatcaattaaacgcgttccacctaatttcgccgcgacaaacaacacgatatcacgatcaaattgagaagcagctaacaaattaggttggcgagcctccacataatccacaacaaaaccattgtctgtcaacagtgttttcaaatctgccaagacttgttgtaaatctttaccttggtgtaattgctcttcggcttgttttaaaccttgataaatgactggtgcaacctgacgctgttcaggagtcaagtaaccatttcttgaactcagtgccaaaccgtcttctgcacgaacaattggtacgccaataacttctaacggaatattcaaatcctgtacaaactggcgaatcactgctaattgctggtagtctttttgaccaaagaaagcataattcggttgcacaatattaaagagtttggtgacaaccagtgctacgccatcaaagtgccccggacgtgagcttccacataaatcatcagtaatttgactgacgctaatgttagttaagcgaggttgtgtaccgtacatttgttcaactgatggtgcaaaaataatgtcacagccaacatctgcaagtagacgactatcctgctctaacgtacgcggataattatcaaaatcttcacccggaccaaactgtgttgggttcacgaagatactcacaaccacaacatcacataactttttcgcttcacgaacaagagtgaggtggccttcatgtagatttcccatcgttgggacaaaaccaatgattttacgtgcagctctagcaggatttaaagaagcagctaagccttgtatagtggtttctgttttcatgaattacagctcaacttggaaagtgtgttctttagctgggaacgactgatcttgtacagcagcatgaaaagctttaaaagcatctaaaatcgctgtttcaccagattgttctttcataaagttacgtacaaaacgcgcaactcgaccaaacgttagacctaacatgtcttgtacaaccaatacctgaccatcagtcgcattacctgccccaataccgatcacaggagtatttgggaacaattcagcaatttcttgacctaattgtgccggaacgcattcgagtaataaaactgccgcgcccgcttcaaccaccgccgtacaatcggcaataagctgatcggctgcttcacgcgttctagcttgtaacttgtagccaccaaatacatgtacagactgaggagttaaacctaaatgtacacatacaggcacaccattacgtgttaacacttggacagtttcacttagccatgcaccaccttcgattttgatcatttgggcaccagcttgcataactgttttcgcattctgcaaagcatcgtttaaagtggcataactcataaatggtaagtcagtcataattaaagcatgctgattaccgcgacggactgccgctgtatgataggccatgtcttcaacagttacaggtaaagttgagtcacgcccctgaattgccattccaagagaatcaccaattaagatcgtatcaatttcagcaagttccattgcttttgccatacttgcatcgtaacaagttaggcaagagaacttacgtccttcggctttaaattttcttaagtcacttagactaatcatgatggtatcctctacaggagtttgcagaacgtaataagtccggctttaagcccaagactcatcagcaagtacagtcagcgttggctgttgtatgagttctaaatttttaagtggctgatcattaatatgtagatcagcatctaaatctaataaaggaatcacaacaaaatctcgttgtaatattcctacatgcggcaccgttaagcgctcattttgtattttttcattgccataaatcagtagatcaagatctaaagttcgctccccccaatgacggagtcttacccgcccagcttcctgctcaaaacgctgtaactggtcaagtaagtcaagcggaagtaactcggtttttagctgagcgactgcatttagataattcggctgatcttggggacccatagggggactttggtaaagtttagatactttcacttcaccaagagatttaagtttggctatcgcttcagacagaatctggcgtgagtcacctaggttacttcctaagccaatatatgtggttactgtcattgtgtcggcccaaaaataacttggctcaaatcacgttgtacccgcttgcgctttaaaattggatgatcactcatcacattcgtttgtgctgcggaagatttttcaataaaacggtcaatagactgctcttgtcgtgcacgttcttttttaccacgacggcttcgagactctggaacatcaaccaaaggctcaatttccgtatcaactttattgctttcaacaggctcagcagcaaccttacgacgacttttcgccttctgacgattatattggctaatcgcagcttctttttcgtcgtttgacatttcttggtaagcttcccaccagcttcccattccctgtgttgtgtcatcacctgacttttcacgaagtaataagaagtcaaacccagcgcggaaacgagcatggcttgccaatgcttcaatttgctgtggttttggattaagcaaacgggtttgcatttcccaaacttcacgaataaaagtttcggcaaaacgaggaataactgtgcgtgttgcttgacgttttaaaacatccaaacctgcttgagcacgtgcttcggccggaacaacgccttttgataaataaaaatcacaacgctctaaaaatggctgccacaataaaaccgcatagaaaaatgctggattaatcgttttacccacctgaatacgttgatcagtattttttgctgcacgttgaataaatggagtgagatccggacgaatatctgcaaaaagctgtttccacacaccaaagtcaatcaacattggtaacacgcgtgccaaatgccccattgtgaaaagcttttgagactcatcgtataaacggtgtggtgaaacatcccgaagtaattgcgtcatctcaacatcaaaaatgtcgagaattgccgaatcaattttaaagttgagcttagctgcaaaacgtaatgtccggagcatacgcaccggatcttcttcaaaacgttgcacaggatcgcccaataaacgtaaagtcttacttttgacatcatcaattgctttacagaaatcgagcacaatacccttacgcggctgatagtacagtgtattgatagaaaaatcgcgtcgagcaaagtcctgttcgatggttccccagttgttgtcacgtaaaatcatgcccgaagcactggtcaccgcttttttaggaggcgcacggaaagtggcaacttcgattagctcacgtcctgaatagacatgtgccaattcaaatcgacggccaacaattcggcatcgacgaccaaaaacttctttaatttgagaaggtgttgcattggtgactgcatcgaaatctttaggattgagtcctagcattaaatcacggacaccacccccaacaatataagcttcatagcctgctttagtcagactatcgatcacatctaaaatcgaagaaggaagttgggctgtggacaaaccacattttgacgctcgcaaggtttgcaaaagacgctgtctcctacgtcaggacgtaaataacaagttgtcgctaatcatagctctaacacacacaaagggcaatttgattctcttagattgcgcaggaaatgataattgacgaatagaacttttataaggctaaacgcgatttatttttttcaaaaatagctggtccaattcctttaacgtttttaatttcgtcaatatttttaaagctaccgttcttttgtctgtattctacaatcgcttgagcctttttctcacctacaccttttaattgctgaaactcatttacattcgcctgattcaaatgaatttgccctgtagagtcattaaaatttttagtttgagaaattttagaaccattagaatgagaagacttagtgatgtttaacttttggtcatacatctgctgtttagccttccattcttgaaagttttgatcaaaagattgagcgtaaaccgaaggtgaaattactcccaagcacaaaattattaaaacaaaatacttatttttccaaaatctcatgctgtattgcatgtggtttttcccctgattttaattgtcgttttgcctgattccacaattcatccatttcggacaaggtcatgtcttccaatgttctttgctgttttatggcttgctcttcaataaaagcaaaacgacttctaaatttatgtatggttgataaaagtgaactttcacttgaaatgccaagtttacgtcctacattgactaatgaaaacaggcagtctccaaattcatcttgaatttcattactattttgatttttaagtgcctgtttaaactcatctaattcttcttctaattttgtataagcatcttctaccgtttcaaaatcaaacccaacttttgcaacatttttttgaatttcctgcgcctgagatagtgctggtccatgtttaatttcatctaatcttgattgtggttttccttgcttttcttgttgtttaatttgttcccataactcacttacttgttctggtgttaagttgttaaattggtctgcttgaaaaacgtgcggatggcgtcgtactaatttttcgctaattgcctcaaccacatcttgaaaattgaacgccccctgctcgctaaacatttgcgattgaaataccacttgtaataacagatcacccaattcattccgaatttcattaatgtcaccttgacgaatggcagcctcgacttcatatgcctcttcaatcgcatatttagtcagtgacattggagtttgctcttggtcccacggacatttttcacgtagctcttgcataattttaagcaatttatccatgtaaccctcaagttcaaaaaattggtcagtaactttaaaatcttaatttgctatgatcaaaattaaagcggcaaatcattcgtcatattgtaacgataaagagaaaaaaagatgaaacatagcattctgattagtggcgcagctcaaggtattggagcagaaattgcacgggtattttatcagcggggttataaagtcggcatttatgacattaatgagtcgcttgctcaaaatttagcgcaggaattaggaccgaatgcatgcgcagggtatctagatgtcagtgactacagccagtggcaacatatattaaaagaatttaccgactgggctggcgagcttaatattttggtgaataatgcagggattttatattccggagcctttgaaaatatcgatatcaagtcacaccaaagaacaatcaatattaatgtaaacggcgtaatcaatggttgccatgctgcactcccttatttaaaacaagcttcttttgcacgagtcattaatctctcttcagcttctgcaatttacgggcaagctgacctcatttcttattcggccagtaaatttgcagtgagaggaattaccgaaggtttagatgtggaatggaaaaaatacggtattcgtgttttagatgtgatgcctttatttgtacaaaccgcaatggtcaacaatatggatgcaggttctattcaaaacatgggagtcgatttaacgcctaatgatattgctcaacaggtgctttcacttgtagagaaaaaagctcatttctggacacctactcacactccagttggtataaaaaccaaattgctttatcaactctcaacaataagcccccagtttttaaatcgtttaacgaatatttatctatcaagaaagtagcttataaaaaaggccgtcaattgacggcctttttctcaatttagttaaacaccttgaatcatgcgtcgtgcgctaataatccccggttgttgctctaaacgagctaacaaacgtgaaagctgagccaagcctttcacctcaatgagcaacttcatattagcaataccatctgcctcagaaattgtgttcacctgacggatattaatctggtcagaaaaaatcacttgagttaagtctttgagtaagccacgacgatcataagcctcaactacaatttgaacactttgaccacgagttggctgcatttcccaatcggcttcaacagcacgttctggctcttgcttgatcatacgttgataatcagaacataagactttatgaatacttaccccacggttcaacgtgatataaccggcaattgattcaccatgaactggttggcaacactgcgcaatatgtagctcaacattgtctaaaccatcaattaagatgccatgcgcagacagagtatgactagcacgtgggtttaatgttggtttaagtaccagttcaggttcatcctgatccagatgcatttgacgattaatctgattaatcagagcatgcaaactaatatcgccgctgaccagactaaccaaaatatcatcccctgttttcacattaaaatgtgacgagtaatcgttgagatcgatactcttagggtgaatcgccaatcgagacaattctttgtttagtaactcacggccaacttcaaggttcttactacggtcttgctgtctgaaccaatgacgtaatttgtcacgggcacgagctgtcttgatataacctaaagagttcaccaaccagtcacggttaggctcacgatccttcttggttaaaatctcaacctgctcacctgtttttaacgtataggttaatggtacatagcgctggttaacacgtgctgcataacacttgtttcctacctctgtatgcacatgataagcaaagtctaaaactgttgagccacgtggtagttctttaatatcaccatcacgactaaagacataaatcttttcaaaaccttcaaagtcttgaagctgatcaaaaccttccgtctcatcttcattttgatgtactgttgtttcattacgttcttggtaatgttccaaaacagcacgaagcgaatgcaaacgatggttaaaagagtggtcggtattctttgaaccttctttatagttaaagtgcgaacatacccctaactctgcttcgtcatgcatctcatgagtacggatttgtacctctaaggatttattctcagcaataacagcagtatgtaatgagcgataaccattggctttcgggttagtaatatagtcatcgaactgatgtgggatatgacgccaaatctgatgaacaatacctaatgagtgataacactcaggtacgctattcaccaatacacgtaaagcacgaatatcataaagctgatcgaaacttaggtttttgcttttcatctttcgataaatcgaataaatgtgttttgctcgacctgtaatttcagcttcaataccatgcgccgccaattcactttttaaacggtctatcacgaactggatataatgttcacgctcaagacgtttttcattgagtaatgaagcaatctctttataacggtctggcgccaaataacgaaacgctaagtcttcaagttcccacttcagctgtgcaataccaaggcgatgcgctaatggcgaataaatagttaaaatttcacgtgccacacgctcttgacgttcacgagatgagtttgccaactcacgtaaagagtaagtacgttcagctaacttaattaaaacgacacgaacatcttcggtcactgaaatcagcattttataaatgccgcttaaatgttcccgttggttgttattaaaatggtcttctagtcgtttatttttttcaataagctctgaaagcttacccattgccaaagtacctttgacaaggttataaacttgctcaccaaactttcgctttacttcttctatatcagtaatgtcctcacgaacactacgataaagcattgcagcagataaagtatcttcatctacatgtaaatgcgccagaatatcagccattccaacaccagtagcaaatgtattggaacgatgattaaccgttgaatctaactctttttgtagggttaaatgcgcaacctcttcgagttgtttaagctctgccccatctaatatttcacgaacccgatccaaccatgaggctaaaccgacttgtgtttcggcggcatgctctacagtcgtttcctctgacaactcagttagttgttcaggtaactgttcacgtactgtgaccataccattctcctggatatgtaactcatgtttttaatcgtttatctcttgaattttctcaaataaagcaatcgattcaacatgttctgtgtgcgtaaacatgtccataaccgctgctttttttaactggtaaccatgttgaaccaaaacacctgcatcccttgctaatgttgctggattacatgatacataaacgattctttttgctccaaagttcggtacatactgcataatttcatatgcaccagcacgaggaggatcaatcaataatgcatcaaatccttgatttgcccaagaatgatgcgaaaaatcttttgttaaatcttgtgaaaagaagcttgcctgcaccagattattacgctttgcattatctgttgcccgctgcaccatttcttcacttgcttccacacctacaacctgaccctttgcaccaacacatcgtgcaagtggaagcgaaaaattacctaacccacaaaacagatctagtactctttcaccctgttgcaattgaagcaattcacatgccaattgcaccatttgttcatttactgtggcattgacctgcgtaaaatccaatggcgaaaaagcaaaatttacatcaaatgcatttaaagcataatgtaatcgcatagctccttgttcttcatcaatacgacgaagactttcgggtcctttaggttgcaaatacaactgccagcctttgtgtaacgcaaattgtcttaattggttgacatcagcattgtttagtttttcgatatgacgaactaataaagatgtttcataatcaccttttgctaattctacatgaccaatatgcgctttgccttttagactttggagtaaattacgcaattccggcagactatctgataactttttatccaaaacgctacaagtatggatagatgttaaacgattactatgatgctcacgaaaacctagaatcaaacggtcctgttttggcaaatagcgcacacctattcgagcacgacggcgataatcactttgcaaagaacgaattggttctaaccattgttcaggctgaataccagcaaagtgttgcaagtgtgactgaaggacattttgctttaaacagatctgctcatcagggtggatgtgctgcatgctacacccaccgcaaataccataatgaggacaaactgcctctacacgatttgctgaaggttctgctaaaagcgctaccatttcagcttcttcaagtcgcttagcctcatgcgtaatttgggcttttactgtttctccaggcaacgcataacgaataaacacttttttaccatgcttatctgccggatggtctggatgagaaccataatgcgcaattccccgcccctcatgagaaagagtttcaacctgaaaaatatattcgggttgttgaggtttacgagatttggcttgctgtttcaaagaatgaacctaaaaatttaaaggattaaaatagtgggacgtaaattcggtatgcttcgaagtacgttgccacacctcaagaaaatcggcttgctgaggcatagtctgtaaatactcaatactcgaactaatccagtggttatgctcatctatattcatttggcctttgagcaatagccaacgcaaataaataaaccatgtattgagcacatcaccttcacaataactggttaactttaaccattgttctgtacgtacgtattcaggcacatgataacccgactcaccacgtttacctggtaaacctaaaatacaggctacatcatcgagtttctgaaaattacggccattaaacattgccataacatccattaaatcaatatgacggtggtgataacggttttggtaattattaaaacgcttctgactatcaagctcgccttgatcaaataacccgggtgccgaaagaccatgatacatggcacggaataaaatgacgggcaaatcaaattgcgaaccattccagctcactaaagttggatgacgcttatcaaaaatggatagaaacttctgtaaaatttcagcttccgaatagtgttcccgactaaaagaaaataatctgaaacctgattcatcaatccacaaaccagaaatacaaacgatttcatgtaaaggcaaacgctgaaaatccatgccggattcttggcgacggatttttgtgagtgcctgttcaacatctgcctctggcaaatcaagatgatataaatgcgctcccgcttttaaatcagttaaagtttcaatatcaaaaactaaagtaggaaaacgcattttttctctcaattatgagtcatcagtcctgtactgaaaacaggcctgtagacaagtagcgatcaccacggtcacagataatgcaaacaatcacagcatccggattttcttctgcaatttttactgaagcccataccgcccccccagaagatgtacctgcactaattccttcttcacgtgctaaacggcgagccgttttttccgcttcaatttgcggaatatccataatttgatcaacacgctttggttcgaaaatcgtaggtaaatattcttgtggccaacggcgaataccggcaatatttgaaccttcagaaggttgtaaaccaataatttgaatatctggattttgttcttttaaatacttagaaacacccataatggtaccggttgtacccattgaacttacaaagtgggtaatctttccacctgtttgtttccaaatttcagggccagtcgtaaggtaatgagcttcgacattatctggattgccaaactgattgaggaccaaacctagaccttcagcttgcatttgcaaagccatatctcgtgcagcttccatattcggtgcttcaatcaattctgcgccataagcacgcatggcgtccttacgctcctgacttgaattcccaggcataatcagtttcattttatagccgcgcatcgccgcaaccatagctaaagcaataccggtattaccactggtagcttcaactaatgtatcacctggtttaatttgaccacgcttttcagcctgcataatcatgttatatgcaggacgatcttttacagaacctgctggattattaccttccaattttgctaaaaccgttgcctgcgtatgacaagccaagcgctgcaaacggaccagaggtgttttacctacatagtgatctaacaaaaattcgtcggctaaaaaatcaggttgtgtattactcatgatcaacacctaaatcggggtggcactattgtatgaaaaaatgatcggtactgcatccatttcactatgctttttaatgaaagtgattaaagcccagtcagttataaaatgccgtctgttttaaaataaagcgtgataatatgccctacagagagatcaatctgatgtagctatgtctaatttcaataaaaccttatcgaaacgcttacgtctgaatcatgcatatgggcaattaattgctcttatttttgtgcccattatgattttaacgtgtgttggggcttttctggttttaactgaaacatcacgttctgcaaagcaacaacaattgcatcatgcctcagcgattttggcacgctacaatcaaattgctaaagatctctacacattagtagaactacaaccagacgaatatgatcatgctcaacatattatgcaaagtatgtttagcgagaaaaatctaaagcgtgctgctttaattgatagtaatggtcagacttatttaagtatcggttatcgagataatcgttactggcctaacttcacacaaaacaataacttttttggtccgatctcttataaccataataatatttatggagtccgtatcattgataccgcaggaaagcctcctgtctggctcttgattgaaatggataatcaaccacttgaattagcgcgttatcgcattttgattgctttggtcattaccggtctgatgactttattattacttttgctctgtcttaacttttattctcgccgctggattgcacccatgtatgaaatacgtatgcaattacagcgtctcaatgcagacactttagaccaacacatcgtgattaacagttccggtgagttaagattactccagcgcgatatcgcaaacgtggtgaaacgcttacattttagttttttagagttaaaagaacataccgagcaaacagaagaagacttacgcagaactttagatactttagaagttcaaaacattacttaccgtcaagcacgcgaccaagccatttcatctaatcaggcaaaatcggttttccttgccaatatcagtcatgaacttcgtacaccgcttaatagtattgatggctttattcatttattacttcgccaacaaaatttaagtaacgaacagaacctttatttacaaactattcgcaagtcctccgcccatttattagcattaattaatgatgtattagatttctcaaaaattgatgcaggtaaactggaacttgaaacagcaccttttgacttagaagaagctgtatttgatgtcatggatatgttgtcacctttggctgcacaaaagcatattgccatggctttttattatgcagacaacattcctcaacaagtgattggtgatgctttacgctttaagcaaattttgaccaatttgatttccaatgccatcaagttcacgccagacggtgaaattattgttcgtgtacgtatggaacatgatgacatcggtcagtgcttgcttcattttagtgttcaggacagtggtattggtttaagtggtacagaccgtaaaaaattatttgagtcgttttcgcaaggcgatgcatctgttacccgccaatttggtggtacaggcttaggtctggcaatttctaaacaattggttcatctcatgcatggccaaattggctttgaagataaccaagaacgtgctccaacagaaaaaggttcaacattctggtttactgcacagtttgctgtagatgaagaacatgagattgaacatcctcacttcgaacatttacaagtggtgtcttatttagctcaccctgcaacagccagtgttttgcgctactatcttgaaaattatcaagtaccacatatcgaaactcaatcgattctggacttgtttagccgcttaaaacatctcgaccaaaaagacaatacatggctcattgttgatcatagtggtgatactgaagctctactcaaagaaattcgtagccgctatcaaggtaacttagcagtttacggctatcaaatgacgcttgagccaaacatgctcaccgaatatcgcgctcgcccactttatcaaccattaagccgcagtggcctcattcaattattaagtgaccaacctatctttgaagaggaacaacaagactttaatggacagggtttacatattttggcggtcgatgaccatttacctaacttaattgttttagaagcattattaggtgagttaaatgtcaaaaccactaaggctttaagtggacaagaagcgctgaatattattcaagaaagaattgatcagaagcttaaaccatttgatttggtatttatggacattcaaatgccggttatgtcgggcattgataccacacgtgcgatccgatctttagaatccactttagatggggaaatgcaacttccaattattgctctaacagcccacgcgcttgcagatgaaaagcaaaagcttcttaaagttggtatgaatgactatgtcaccaaaccaattcaaatggagcagatcattcaaattttaacgcaatggacgaaaaacaacttcactgcgcaaaatctagctaaagatcatcatgtggttgcagaagcgttagatccagaaattttaaattggcagcaaagtttacaactggcagcaaacaaagaagatttagctcaagatcttctcaaaatgttggtagatagcttcccaaccgagctagaagaaatgcaacaactcattgagcttgaagactttcctcagcttgagcatgtactacaccgtctctatggcgcaacacgctatgtaggcacaccaaaacttcaacaagtgacgggtgactttgaacaatttatttctacgctacgcaaagaacgccgtagagctgacgatggcttcattgaagaagtcatgagacgtttcgatgaattaggtctcgtcattaaagaagttgagagtgcagctcatcaaattttagtcataccagattaaataatagttgttaaataggcatgactgacctgtcatgtttccaatttccagccatgctatgctccgcttatcgataaaaaaataagcgggaatttcatggcacttttacgtattgaaaaaaataatggcattgcaacagtttatctaaaccgtcctgataaacgtaacgctatgagttttgctctactcaaagaactcgtaacaacggctaaagctatacaaaaagaccgagatatccgctgtgtaattttgacgggtgaagcacaagtgtttagtgctggtattgatttatctgacttaaacaatcctaagaactctgcatttgctatttgggaacttgttaaaccagggcaaagccttttccaaaaagcctttcttatttggcaaaatttgcccgtccctgttattgccgctcttgaaggttattgttttggggcaggtatgcaacttgcactagctgccgatatccgcattgcccacccagacattaaaatgtcgattatggaaagccgctggggcttagtaccagatatgggtcttacccgttcgctcaaaggcttgattggagttgaccttgcaaaagagctgactttaactgcccgtgtttttgacggaaattatgcaaaagatattggacttgtgactcacttaagtgagaatccattagaaaaagcaaatgcgatcgcttcagaaatgttgcagcgctcacctgatgcattgactgctgcaaaacgtgtactagatgcaatggaacatcaaccagaaaaatcattacgcttagaaaaaatctggcaacttaaattattacttggtaaaaatagcaaacttgctcgtaaaaaagacaaacatccggaagttaaatttttaccacgccaatatagataagagctttattatgaattttgatcgtaatactcctattgcttttttaggcataggacttatgggaagccgtatggcaagccgtcttatacaagccggctttcaggtcgcagtatggaatcgaacagcatctgcttgtgaagaacttattgatattggcgcgcatgcactcgatctttccaacatcggacagtaccctctcattttgacttgcttagccgacgataaagctgtgcaagcagtatttgatcaaattcaaacaaacttaaaagcgggtcaggtcattgtcgacttctcaagtctctctgttgctgcgacaaaagcacttgctcaggctgctgcttcacaagatgtgatatggattgactcccctgtttcaggaggtacagctggggcagaacaaggcacgctagtcatttttgcaggtggcgatgctcaaactattgaagctttaagtcctgtttataatgttctttcccaacgtgtcacaagaatgggagatacaggcacaggacaagcaactaaaatttgcaatcaactcattgtggcagcaaacagcgccctgattgccgaagcagttgcactggcagatcgggcgggcgtagataccactttactcgctcctgccctagctggcggatttgccgactcaaaaccttttcaaatactggcaccacgtatggcgactcatactttcgaacctgttcagtggaaagttcaaacattatcgaaagaccttaacaacgcagtaacattggctaacaatgttaatttagacatccccgttgcacaaaaagctctattacagctacaaactcaccaaaaaaatggctttgctgagaaagatttagctactatgattcaagtagtagagcaataataaacggagtttgtgtatgggtcgtcttgccgttaacttatccatgatttttaccgaagttcctttaattgaacgctttgcattagcccatgcagagggctttgaacatgtagaaattcaattcccatacgagcttgccatttctgatattcaagaccaacttgaacgttacaacctaaatttatgtttaattaacgttcctgctggtgaccttatgcaaggtggaaatggcttagcaggtataccgggtcaagaggctgcatttcgtgaggcattacagttagcgattcgctatgccacagcattaaaagtacctcgtgttaatattttggcaggtaagcaacctcaagactctgacttactcccttgccttaagacacttgcaagcaacttaaaattagcctgtgatttactgacagaacacgatattgaacctgtatttgaaatgattaatggcacagatatgccacgctttttggtacagaacattgcccaagcccaagaaatgctagaagcagtcaatcaccctgccttaaaaatgcaatatgactgttaccatatggcaatgatgggtgaagatgtacttgaagggttacaagaaaatattcaccagattggccatattcagtttgcagattgtccgggacgccatgaacccgatacagctcaaataccgtatgagcaaattttttcatggattaagcaaagtgcttatgagggctatattgcggcagaatataaacctaaaaatggctcaaatcagtcatttacatggaaaaagaaatatttttccgatgatgtaaatatataaactgttactagttttgtttgaaattctgagtgaaaaccactatattagatagtgagtaattgtcaggaaaatataccctatatgaatttagaaccatcgcccagcgtgtctaattctcacgatttcgcaatgaacacctcaaataaagacgtacaagcttgtcttaaagtcgtccatgacgctttagttgatgtaaaagcaaaagatattctacagttagatgttagttctattagcaatgttgctgatgctattgtcatcgcgagtggtacttctactcgtcacgtcaaagcacttgctgacaatgttgcagaagaagctcgaaaagctggtttccgcccgattggcgttgaaggcgaacgagatgccgaatggatcttaatcgatcttggctttgttgtagtacatgtgatgctaccaactgcccgcaaattctatgatttagaaagcttatggcgtactgctccagagtcggtcgcataaaattttgcttttaaaaaaagcggctcttttgagccgctttttgtttatatacttactcaaacttttattatttaaacagccacctttaccctcacttcctatgaaaagctgttaactcaacaaaactttaataacactaacaagcaagtcatcactcttatttaaaattgacatgacaaattgtcagaattccagcactataccaattcttatagtctcatcaataaatagcataaccggagcactaaaaagtgaagatactcattacaggcgccaacacaggtattggttttgccacagcagaacaacttgtaaaacaaggacaacatgtcattttggcatgccgaaatcctcaaaaagcacaagaggcacaaaacaaactacgctcactcgaccaaggacaagtcgatgtcgtttctcttgatttaaacagccttgaattaactcaaaaagctgccgaagaaattgcagataaatatggcagccttgatgtacttattaataatgccggtctattttcaaaaacaaagcaactcacggtagatgggtttgaacagcaatttggcgttaactatttaggtcactttttattaactcaaaaactactccccgttttaaagcagtctcctcaagcacgtattattcatctagcgtctattgcacactgggttggttcaattaagcctaataaatttcgtgcggaaggtttttacaatcccctgttctattatggacaatccaagcttgcaaacttactgttcagcaatgcattagctgaacaactagcagacaattcaattaccaataatgcattacaccctggtggtgttgcttccgatatttatcgtgatttaccaaaacccgtttatgcagccatgaaagtaggtttagttccaacatcggttcctgcaaagctcattacagaaatggcgactggtgacacatggcaaaaccgcaatggtgaatatgtcagtgcgcatatgcctgactggaaatcctctcatgccaaaaaccagcaattagcacgcgatctctatcagcaatctatgactctagtggaaaagttcctctaaccctcaaaaaataaaaaaccacccgaaggtggtttttttatatcaaagcaacttagtggcctgtaccattaattgctttcgtcatatcttcaacaactttcttagcatcaccaaagatcatcattgttttttcgttatagaacaagtcattatcaagtccagcataacctgtcgccatagaacgcttaatcaccatgattgtacgtgctttatgtgcttcaagaatcggcataccataaattggtgaacctgggtcatcttttgcagcagggttcacaacgtcgtttgcaccaataacaagtactacgtcagttgctgggaagtctgagttaatctcatccatttccaagatgtcttcatatgctacgtctgcttcagcaagcaatacgttcatgtgaccaggcatacgacctgcaaccgggtgaattgcgaaacggacgcgaacaccttgctcttttagaatttcgcataactcttttacagcattttgtgcacgaccttgcgccataccataacccggtacaatcacaacgctgtctgcatttgacattaagaagccagcatcatcagcagaacctgaacggtagttacgctgaacctgttcacctttagcagctgtagaaactgccgcaccacccattgcaccaccaaacaatacgttgatgattgaacggttcattgctttacacatgatgtatgacagaatcgcaccagatgaacctacaagtgaacccgcaacgatcaacatgttgttttcaagggtaaaaccaatacctgctgctgcccaaccagagaacgagttaagaagcgataccaccacaggcatatcaccaccacctaccggtgcaatccatacccagccaaatgcaagtgcaagtgcggtcattgcccagaaagcagtcatgttgccagttgtgaagaagtagaaaccacaagccaacatcgcaacaaagataagtgcttgaacaggtttaacccatgcaccagagattgttttagcccattttttcgcagccaatttaccgtaagcaaacacagatgctgtaaaggtaatcgcaccaacgaaacaaccaacaaacaattcaaataggtgaaccttactcatgtgtgcatgttgcacgccagccgctgttaatgctgcctcattttgagcaaacaatgctgtaagctggttgttatgcaaaattgctgcaactgcaatcaaaaccgcagccaaacccaccaatgagtgcataagagcaacagtttcaggcatttgagtcatgggtacagtacgtgcacgtgcaatacccacaatcgcaccaagcaccattgcaccaccaatcatccagatcactgggttgttggcaacaaagaaagttgtcacaactgcaatcgccatcgcgatcataccgtaacggttaccttgaattgctgttttaggaccagacaagccacgaagcgtcaagataaagaggattgcgcctacaaggtataaccagtttgcatttgcttgaataaattccatgtcaaagccctcttatttcttttgcttaggcttgaacatttccaacatgcgtgcagttactgcaaagccgccgaaaatattaatgcttgctaaaaataccgcaatggcacccagtacactcaccacattcacactttgaaatgcaacgttagcatccacacctaaaactggcagacctacagtttgcaacatcgcaccaacaacaataatcgatgacaatgcgttggttaccgccataagtggcgtgtgcaaagctggtgtaacaccccaaacaacgtaataacctacgaagatggcaaggacgaaaattgtaatagtttcaaccatgagaaatctccttaaccacgcttaagcagcacttgaccgccatgagtgaccaatagggctttttggatttcgtcttcttgattaatcgcaaagtttttctctttgtcgaataaagtctctacgaaattaaaaacgttacgtgcatataatgcagaagcttctgtcgcaacagtggccggaatatttggaatacccaaaatttttacgccattttcagtgacaacagtttcgccaactttagaaccttcaacgttaccgcctgtttcaactgccatatctaaaatgacagagcctggtttcattttggcaacagtttcagctttgatcagacgcggtgcatcacgacctggcaacaatgctgttgtaatcacgatatcggcattcgacacagccttatctacaatcgcagcttggtctttgatgtattgctcacccggcatccagccataaccattttttgctgcatctgctgcacgttgctgttcttcttcagacattggtacgtctaaccacttaccacctaaagactcaacctgatcttttgctgttggacgcaaatcagttgcttcaacaattgcacccaaacgttttgcagtagcaatcgcttgaaggcctgcaaccccaacacccataatcacaacacgtgcaggctttacagtaccagcagcagtcataagcattgggaacatgcgttgatattcagcagccgcaagcaaaactgatttataaccagctaagtttgcttgagaagacaacacatccatgttttgtgcacgagaaagcgtacgaggaagcaattccagagcaaaagcagacacttgctgattcgcaaattggtctagctcggtattacgataaggatcaaacattgctacaacagttgtatttgctgcaagtttttgaatttccccgccttgtggcgcacgaactttcaaaataatttgactacccgtataggcatcatccgtaatggttgcaccgacctgttcataagcactgtcaatgtacgcagcctttacaccagcaccacgttcaatcacaacgctatgaccagcgctaatcaacttctttactgtctctggcgtagcagctacacgattttcaccgacgacagtttcggttgggattccgatctgcatgagcgttcctcaagctaatttctcattgtcaaaaacattgcaacccgcaatgtttcccccatgtgtattctttgtacagaatttggattctaattgaactttttgaaaataccacccactatttatttaataaatacccatattttgaactgatgattcacgatatttgacttgaggtgtaatataggaagatttttcttttttttgcagacaatagtctctcttatacagtcctgtatatgaaaatttctttatcttcgtttcaaattgggtctttttttgcgctttgctctgcttttctattcagcacaaaagcgattttcattaaacaaacttatgccctttctccattagtagacggtacagtcctgatggctttacggatgttaagcgctttaccgttttttctattaatttgctggttcaataggcatcataatcagggcataaaaaagaaggattggctaattttaatttttgccggtctgttaggctactactttgccagctggctcgatttcatgggcctcatgtttattagcgcttctttagagcgaatcatcctatttttatatcccacacttaccgtgatcgcttcaagtctgctctacaaacaaaaattagatgtaaaaagtttattcgccatttttcttagttatggtggaaccgtgttagtgatgctgcaagagcacaacaatgcaccaattcagggcaacttttggctcggaacaagttttgtatttgctagcgctgtagcttttgccggttatttactgctgactccaccattaattaaaaaatttggttcttggaatttcacaggcttagctttaacagttgcctgtataggtacattaacccattacactttaagtacccctcacccgtttcaactcctattacaacttccctcaagtgtaatttggtacgggattggcttaggttttttagtcactgtcttacctaccgttatgcttatgcaaagcattgagcgtctcggagcatctcaatctgcaatgattgcttcgatcggaccagttttaacgattttgcttgccgttgcttttttaaatgaacacctaaatatatggcaatgggtcggttgtttcctcaatatagtcggtgtaatgatgattactttaagaaagaaaagactaaaacactaaatgctcttgacctcaacttaagttgaggttggatactcatctaaattttattaaacggttgagttccatgaacaaagaaatttttaaaatcataaatccttctactttatatgacccaacacctaacgcttacagtcatatcgctgtagtaagtaattttaacaatattattcatattgcaggtcaaggtggcgaagaccaacaaggtcaattaagttctcatttcagtgaacaagtcctacaagcatttgaaaatattaaatatgcgttagtagctgccaatgcagaacttacggatatcgctgttttaagaattctagttgttgaccattcggtagaaaaacatgagattttgattaaaattatgaaggatttatggaaaaatcatccttttccagcctgcacactcattcctgtgccgcgtcttgcactagaacatatgctcattgaagtcgaagcaacggcatacacttaataaaatcgagagaacatcatgtctacccctgaagatatcagtcaaaataaacctttactttggttgatggcagcagcatgtggcctatgtgcaggtgtgaattactattgccaacccctaattcactctattcagcaagattttgctgtaactcaagcacaagctgctttaacagtaacatttgctcaggtgtcttatgccttaggtttactctttattgtgccaatgggggatatcgtcaataaagccaaagctattccgtttttaatgatgctttgtgcagttggcctatttacctctgcttttgctgttaacttacctatgctctggatcggtacaattttagcgggtttgttttcagttgcagctcaagtgcttattcctcttgcaacaatgacggttaaacctgaaaaaactggtgagattattggttttttaatgagtggcttattggtcgggattttactctctaccagtctggctggcttattttccaaccttttccactggaaagtcgtttatgccataagtggtatattaatgcttctgttggcctataccttaaaaagccgcctaccttatgtcatgcgtatgaaactgaactatggacaaatctttgtttccatggctcagcttttaaagcaggaaaagcgacttttattaagagcgcttacaggtgcattcgcctttgcgtcagtgagtattttgtattcaacaatcgcgttactactgacctcggcacatcatttacccgatctatttattggactggtacctttagtcggtatctttggtgcgttatcaacacgttatatcggcaaatatgccgaccaaggctacacacgtttactcacttggatgggttgcgggctatttttggtaagctggatttgtttctatttcggacaaactctactttcagcttatgttattggttttgctttaattcaattggcacttgcccttgttcacaccagcaaccaaagtattatcttccgtttacgtcccgatgctaaatctcgtattaatgctatttatatgactacttattttattggtggtgcagccggttcagcattagggatttttgcatggaatcgtggtggatggaccatgacttgcctagcaggtgtgggactcgttgtattttgtattttatttagcatgattgatgctttcttacaaaaaaagcaaatggcttagctataaggtaatttgttaaaaatcatctttctatatttaacataagggcggttataaattacgcagttaaatgccactgtcgattcaggactaaaccccgtataatgctgccctttctttaatttagcgacttttgggtctatcggttatgcaatcacttcaatcgttacaacctcgtatttcagtagccccaatgatggactggactacaaaggactaccgattctttgcacggttgtttaacccaaacgttgtgctttatacagaaatggtgactacgggcgcgattctatttggcgatgcgaaacgccatttgggctataacgctcaagaacacccaatcgtattgcagcttggcggctcaaacccacaagaacttgccacttgcacaaaaatggctgaagactggggttatgacgaagtcaacttgaatgtaggctgcccaagtgaccgtgtacagaacaataaaatcggtgcatgtttaatggcagagccagacttggtcgctgaatgtattcacagcatgcaaaaagtggtgaatattccggtaacggttaagcaccgtatcggtattgatgacatgcagtcttacgaagaaatgctgcactttgtagatactgtagcagcaacaggttgtactcactttgttgtacatgcccgtattgcgatattgaaaggtttgtctccaaaagaaaaccgagaagtaccaccgctacgctatgaagatgtttaccgtttaaagcaagaacgcccgcatctgactattgaaattaatggtggtattaaaacttttgccgaaactcaagctcatttacagcacgttgacggcgtcatgattggccgtgaagcctatcacaacccttacttacttgctgagctcggccaactttggaacctagaagcaccagatcgtttcgatattatggaacaaatgctaccgtatattgaacaacgtctagctgaaggtgcacccctctctatcattacacgtcatattttaggtctattccaaaatttaccgggcgctcgcaaatggcgacaagctctaagtggtggaaatgcaaaaactttaactgacgtcgagaatgcaattcataatatgcaagctgctattatccgtactgaagagtatttaaaggaacaccaattttaagccagcccatgtttctaaaattgtaagaaaatgtggcattttaaatcagagacttagattttgagtatattcgcaaatgttggctcgaaatattcaaaattaagctctgattaattatttatattcaataatatcaaaaacttaatttgtataatttcaaaagctcttttaattagcccttttttccatagccagaaataaaaactggcaaaaagatacgttattacataacataaacaaaacttttaagtttgggccattagtatctctgaacgccacaggtaggtggtgattttctaaatacggatataggtagtacgggtagagatttcacgatgattatttatgacggacaagtagctgataactatatgtatcaggattcaaatcaggcagccattgttgtatcccacagcacaccaagcctcccttatccattcaccatgaaacccaataatcactccactgaaaccaacactcctccagccattgatgtagaaaaattcgtagctaaattagaaagtattacctctagacgcagtaaagcgcgttgtgcacgtagcatccgtattgcgcttgagtctgctggtgccgatgttgaaaatcatccgattgcagcatctgattggggcgataccctcaagaaaattggctataaagaaataaatccagcctttgatgagccacaagaaggcgacatttatatcattcacagaacccgcaaccatatttacggtcatatcgctggttacacaggaagcgaatgggtgtcggactttaaacaaagtagttatgacgtctataaagatgataacgtcacctatacttactatagattaggctaattcacttctaagatagaaacatttgatgaatttgctcggcgcagtgctgaatgatttcatcatggccttttctatagaccagtaaaacttccgaaagagatagggaatcttccaaaggtattagttttacattggcaggtaagatttgttgaaactccgcaggaacaatacctacccctaaatttgccgccacgagctgtaactgtgaaatcttacgcgactgaatggaggctttttgtggggtaaatcctgcggctaaacacagatttgcgaccaaataacttaagcctcctctttcggcatgaggtgttgatacaaaacactcatcttttaagtcttttaaataaaccttttctgatttagcaaacttggcatgatcaatatgcacagccaccattaaaggctcttcatataacttaagagtatttataccatctaaagtatgccgaactggtgggcggatcaaaccgatatcaatttcaccatttaataacgctaagatttgctgctcggatgataaggtattaatctcaaagctcaactgctgcgttaggctaacttcttttaatatctgaacctttgtattatccacgacaatactgctggaatgagcaattttaatctgtcgatttttcccttccgaaacacttttagacaggtcaataatttcatttaaataaagcaagttatcttttattttcttatagaagacctctcccgctggcgtgagtcttgctcttttgtccgtacgatcaaacaactgaaaatcaatttcttcttctaatagtttcatttgtcgacttaaagcagactgagcaataaatagcttttcggaagcagcagtaaaactcccttcttcaacaatttttatgaaatattggaattgttttaatgtgagcattatcatctcaaaattagataatttggtctattttctatattagattagatagatctccttcgctagaattttattaagactattcacttgattgaattcttcatgaagtatttaaaaggtttcgcaatatgcaccattgttattttaattttatggtgctttaaattttatgatcagcaactacccacacagcccaaacaagacaatatagagctatatgattaaatagtttttcccaaaacaaaaggcatgcactcacataagcgcatgccttttccatatttaaattaggctttctttaaatcgagctttttcaaaacttcagccacagcaatcatggcaaagcttgaagtcaccaccaccgctgaaccatagccaccacagcgcaagccagccgatgggcagacatctgcgcttgaaaatggattgtcgattgagtaaatacaggtaatgccaaatttctcttttggctttttacagatgccacgagcacgaagctgactacgtagcttcgctaacattgggtcttgttctgtttttgatagatccgccacgcgaattttaagtggatcgagcttaccccctgctccaccggatacaattaaaggaattttattaaaacgacaatggagcattaaagccagttttgctttaacatcatcgatgcagtccaaaacaatgtctggtacagggtttaaaagctctgcaacattttcaggtgttaagaagtcatcaataatattgactttaatgcgtgggttaatttggcgacaacgctccgccataatttcaactttttcacagcccagagttgaggtcattgcaggtagctgacggtttacatttgatgccgcaaccacatccatatcgactaatgtgatctcaccaatacctgtacgcgctaaagcttctactgcccaactgccgaccccaccaataccaatcaccatcacatgactttgttcatagtgctggaacgatgaatcaccataaattttggctacacctgcaaaacggcggtcatattcatcattttgtggtaaatcggacatggaaatggctttctctaaaaaatcaaaccatatattttactgttttttacgtagagcgtcttgccgctcttacaaataaaaatacccagtaaaattgcaataattgaattccaccaacttacttttatttcaaagcaaaaatgaagttgatttcaacagatgcattttttggaagttggtacacgctgaccgatgtacgtgtatgccgtcccgtatctaaacccaaaatttcataaagtatttcagatgctccatcagcaacttcgctttgctgtataaaagatgacgttgaatgaacaaatacattcatttgtaaaacttttccaataacatctaaagtcccatagtgctgttttaaaattgctaaagctctcatggtgctaatacttgcagcaagctgtgcatctgataaatcaacatctaatccaacttttccacaaatctgtaccgtatctcccactcttggaatttgaccactaataaatacaagtccagcgtgttcaattaatgaggtatatttacctcctatttttatatcccctgaaaaatcatatcccaatcgagattcaacttttaaaaatactgtatctctacccataattgcttcttcttataacaaaaattattttatttatatttagcttatccattaaataaagacaataaaaaagcctcatgaatataaggcttttttatatagcttttgaaaaatagacatttatgaagcaatcaaattccgaagtacataatgcaaaataccacctgccttaaagtactcaacctcatttaacgtatcaattcgacataacacattaaaatgactggctaccccatttggccctttcacatcaacctcaagaatttcatgaggctgaataccatccgataaaccacgaatcgaaatgacttcatgacccgttaagttgagggactgtctggtttggccatcaacaaactgtaatggcaacacgcccatacccaccaagtttgaacggtgaatacgttcaaaactttcagcaatgacagcttttacacctaacaagttcgttcctttggcagcccagtcacgtgaagaacctgttccgtattctttaccagcaataatcacaagcggtgtatgttcttgttggtaacgcattgccgcatcataaatggcaagcttctcaccacttggcacatgtatggtattaccgccctcttcgccgccgagcatttcgttcttaatacgaatgttagcaaaggtgcctcgcatcatgacttcatggttaccacgtcgtgaaccataagagttgaagtcttttggctcaacaccttgctcttgtaaatagcggccagctggactgtcttttttgatattacccgctggtgaaatatggtcagtggttaccgagtcaccaagcactgccaaaatacgtgcctgttcaatattcttgattggttttggtggctcaccaataccttcaaagaacggcggatgacgaatataggtcgagtcatcagcccattcgtaagttttactttttggaatctgaatcgcttgccagctttcatcaccatcaaacaccgcagcatattctttgtggaacatgtcggtatttactttttgtaagacagcatcaatttctgcctgacttggccagatatcttttaagtaaacaggttgcccatctttaccttgcccgattggttgagtcgttaagtctgtacggatattcccaactaaaccataggcaaccacaagtggtggtgaggcaagccagttggttttaactaatggatgcacacgcccttcaaagttacggttacccgaaagtacagatgccacgtttagatcatgacactgaatcgcatcttcaattggttcaggtaaaggacctgagttaccaatacacgttgtacaaccataaccaaccaagttatagcccaactcatctaaatacggcgtaagcccagccgccaataaatagtcggtcacgactttagaaccaggcgcaagtgaactttttacccacggtttacgctgcaaacccttttcaattgcttttttagcaagtaaaccggctgccaacatgacacttgggttagaagtattggtacatgaagtaatcgctgaaatcacgacatcaccatgatttaatggatattcttgcccttcaattacacaagatgggctttcatgctgaatattggctttggtcgcttctacagccgtaccgccaccgccttcattttctaaacgttctttcgcttctttggctggcttaagggttaattccatgagcgcattaaacgttttaggtacttccgataaaagtacgcggtcttgagggcgttttggacctgccaaacttgcctgaaccgtactcatatctaaacttaacgtatctgtaaacacaggttcatcacccgcattacgccataaaccttgcgccttgctatatgcttcaaccaatgcaatacggtcactttgacgaccagttaatttcaaataacccaaagtcacttcatcaattgggaagaaaccacaagttgcaccatattcaggtgccatattagcgatggttgcacggtcagcaagtggtaagtcggctaagccatctccatagaactcgacaaatttacccactacacctttttggcgaagcatttgagtaatggtaagcaccaagtcagttgccgtaatcccttcttgtaattttccagtcagtttaaaaccgatcacctcaggaatgagcatagaaataggttggcctaacatggcagcttctgcttcaatccccccaacaccccaacctaatacccctagaccattaatcatagtggtatgtgagtctgtacccactaaggtgtcagggaaagcaaaggtttgtccgttgtcttcacctaaccacactgcttgagccaaatactctaaattgacctgatggcaaataccggtacctggtggcacaacactaaagttattaaatgcagattgtccccaacgcaaaaattgatatcgctcgccatttcgctgcatttcaatttgaacgttttcttcaaaagcctgatcatcggcaaaatggtctaccatcacagagtggtcaataaccaaatctacaggtgataacggattaattttttcagggtcaccccccgcttcagccattgcagcacgcattgcggctaagtcaacgactgccggaacgccggtaaaatcttgcattaaaacccgtgcaggtcgatattgaatttcttgatctgaggtacgggtttttagccactcagctaaagcataaatgtgttctgttttaacactgagctgatcttcaaaccgtaataagttttccaacagtacttttaatgatttcggcagtttggcaatgtcacctagctttttctcggcttgggttaagctaaaaatctgataattgctggaacctactgttagcgtctgtaaagcattaaaactattgatattgctatacttagccattgggttatcctcccatgtctggcaatgttatttttcacgtttttacatgttgttttcttactttaagcttcttttttaatcgctgtgttttgttttagttactatttctaatctttgatttttattacgataatttcaaagcagataaagagtttttccacagcaaatctgctaattctgactctgccatatttaaattttcagccaaactttttagtacataaggtaaattcacaggcgtatttcgagtacgctgctcagttgaagtttggcagcaaagtggcgtcatatcaggacagtctgtttcaatcactaaatgctcggcacctatagcctgcacaaccgtatgaagctttttcgcattggggttcgtgatttgtcccgtcacaccaattttaaaaccaagcttaatcaggccttttgcctcctctactccgccactaaaggcatgagcaatgccaccgagtttaaacttatgcgcttttaatagtgcgagcacatcaccatgtgcttttcgtatatgaagcaacaccggtttttggtattgagttgccagatctaactgatcaccaaaatactgtttttgcttggcatatatatcgggctgcttgtgttcctttaagaaggtatctaagccgatttctcctattgcgacgcagtcttcttgctgcaaaatctgttcaagatgagaaagatgctctggtttgtgctgctcaatataaaacggatgcaaccccggtgctaaataagaagtaggcacgttgtcccactgcttgagctgatgatgggtttgtaccaaatcatcaaaacgtgactgtaaaaagcctattaacaccagagcatccacacccacttttttagcttcaagtgctaactggtgccgatcttcatcaaaatcggcaacatcaaaatgggtatgagtatcaaacagatgcattagctggcactttttgcggcaggtgtcgaagctggtttagctttaggctgcggcaaatattcttctttcaatacttcttgtaattggtcatatggaatgactaaacgaggtagcccgaccacataaggtccaatttcatattcgccatattgaagaatcaagccttggtcacctaataggaaattttctgtgagtttaaacggccaagcttgctcatattcactcacactatttgcaagttttgagtctgtcacccaagctttaaacgcttcatgtgctaatttttctaaagccgcttttttctctggacgtaacaagtcttcaagcttgacctgcttttctttctttaaatcaaaattataatattgctgcgctgccgagccatgtgccccgcctaaatagctactactatttacaacaacagttacgactttaccttgagactgtatgattttaggtttcaccaacagattaatctggtgattactacttagagcctttaattcattgtccaaatcaataaatgaatttgcatagcgctgaacctgagcatcgaaactatcttgttgctctgtagcggcagctactgaagcttctgtcttcttatcagcttgtgctgcttttgcatctggttctgcaatttcaagaatctgtccgagtgcttttaaaacttgttgatcaataatcttatcaataaaagggaaattactttgtaggcgttctaccgtaaattcagggcaagttttaccatcacaatccggtaaagtcactttacttggaactgtttcccctttcaaagtcagttctacaggcttttgttcaaccacagccggtttttgctgatcttccgactctttaggatcacttttaggctgacatgccaccaaaaatatcgcagaagcaagtagcgttaaacgtagcgaagccttagaagttaacatcatattttgcctttattctgagaagattatgcataactcatatgaagttagcgcatctacaagtaggttgcaaattctgctaccaacttaaaacatttgttcataaacctgaggttgcaatatttttttcgtttgttctgttgttaaataaatatcaagttgaggcgcatctttcgtaatctgatttgcctgatagtgcaaacctaccccttcaccatcaaagaaccagtcagcttgtccccaatataaagtttttggggcctgtttgttgacatcggcagtttgctttttcaaccagtcctggtacgcagtttgaacaatttgatgtactgtcggttgctggtcttttttaagcacatcaagcaacgttaagtttttatgaagtttacgatcagccacgaaaaaataataacggtcttttatggtgatctcttcttgtttactgtctaaagccaattgcaataacacatactggttacgctgcgaggcaatgcgtgtacgaatgtgtaattcataagcacgatttttagaatatttatcttgccattcatccgactttttcacgtaagcattaatcgcttgttgaaggcttaaatcttttttcaaattaatttgagcttgaataactttcgcctgatttttttcaatccagctatttaaccacgcatcttgggtttttatggtttgaatatcgacatcaatacaatttttcttttcacaaaacggcactgcataacttgctttggtttcggtcaaatttaaataaggtaaaacctctgctttctcaaccggatggtcttgagtagaagctgaattttcttgagaagatgatgaagactgaggctttttccagacaaatacacaaatagccaaaattagagctatggctgcaaccacaagcgcaataattgtctttttactcaagttcatttcatcatcctttcttatttttcaaaacaaaacagcttctattcgaagctgtttgtcacatttacatgattagtgttcacgtgtgctacggaactcaatatcaggccaacgctcttgcataatctgcaagttcactcggcttggcgcaagatacgttaagtgtccgccaccatcaatagaaagttggtcatgtgcctttttcttaaactcattaagaatcttttcatcatcacaatgaatccagcgtaccgtatttacacttactggctcataaacacagtcaactttatattcttctttcaagcggtaagcaacaacgtcaaactgaagtacacccacagctcccacgatcaaatcattgctaatttgtggcataaatacctgagttgcaccttcttcagacaactctttcaaacctttttgcaactgttttgactttaatgggtctttcaaacgtacacggcggaacatttccggcgcgaagtgaggaataccagtgaagtgcaagttttcaccgctagtgaaagtatcaccaatctggattgtaccgtggttgtgtaaaccaataatatcgcccggccatgcttcttctaagtgctcacgctcgcctgcaaggaaagtcaacgcatcactaatacgaacctctttaccaatacgtacgtgattcattttcaggcctttctcgtatttacctgaacaaatacgcatgaaggcaatacggtcacggtgtttagggtccatgttggcttgaattttaaatacaaagccagagaaaccttcttcttttgcttcaaccatacgctcttgcgttggatgtgctttaggttcaggtgcccagttcataaatgcatcgagaacgtggtcaacaccaaagttacctaatgctgtaccaaataaaacaggtgtttgtttaccttgtaagaaaagttcacgatctaatggctcatttgccatttgtacaagctcaagtgactcttcaaaagaagcccaagctaactcaccaactttttcacgaatatcggcgtgattatagccatcacgtacttcaatatcggtaatggttgaaccaaaacctgctttgtagacatacaatttatcttcaagaatattgtatacaccagcaaagtcacgacccataccaagtggccatgtaattggtacacagcgaatattcaagacgttttcaatttcatctaacaactcaagtggctcacgaatttcacggtccattttgttgacgaatgaaataattggtgtgtcacgcatacgacacacttccatcaatttgatggtacgttcttcgacaccttttgcaccgtcaatcaccatcagtgcagagtcaacagcagtaagggtacgataagtatcttccgagaagtcttcgtgccccggtgtatcgagtaagttaatcgtgtgacctttatatgggaactgcataacagacgtggtgatcgaaataccacgttctttttccatttccatccagtcagatgtagctgcacgatcagatttacggctttttaccatccctgcaacctgaatcgctttaccccataacaacagtttttctgtcatggtggttttaccggcatcggggtgggaaataatagcaaatgtgcgtcgttgagcgacctgtgccgctaactcatctttaaaactcatgaaatacacctactgcggagattgcagtgccaaagatctaaagtcgatcaaaataaaaattggcgtaattgtagcagatttataggtactgtttagagattgttgagttgtctatccgtgttttcatatttggaatatttttaattgagccattaaaaaagcctgttcaatatcaacaggctttttatgaataaacttagacgtttatgctaatttcttttcttcaataaattggacatcggcaatttgtgcatcccaaaactcggtccacagtgcacaataatcaagacatagttgagtcaagctttcataatcatctttggtaatggcttgagccaacgcaaaccaaaggtcatcctgatggtcatcatcagcagcttcagctgtttcatctgttgaaacgccgtgtacatggtaataaccaccaccctcaacatcgatatttacaaacttggttgcttgtcgcaatggtgggctaaaaagaataacttcttcttctgccaccgccaataatgccaccacattaatataacgatcgtaagaagcttctaaaaatgttctcacctgatctgcaatttttgaaggtttataattacggcggtcagcctcagtcaaaccatagtcatttagcaaatcttcatataatggataatgtgcatattcagggttgcctaaataataattatctttatctaaacccggtcgaaaaccaaattcatctaatatatttaagctcaacaacacccgtggaaacattttagcacccgagtgaagctttggttccaattgctttgtcagaaactgcgcctttaataaagcatcggtaaaaatctgaacaatggcatgacgatattctaaatgaatacgagtcaaggtttgtttatcaagataaccgttatttaatatttcaattgcagggtgtttacttactggcaattgcgcaattttattccttaattgtttgagaaacagtaagttttcttcccattgtgaagcaggaatactatctttcatcccctgcaatgctttttctcttggattattaaagtcttcaaatttttttgacataatcattctcaataaaaagtttttcttatagttaagctaaaggctatccctctatttccattacgtattcgaacgtaaaaaggataaattccgtatacccatacttaacgaattgatattatgtttattatctcaacaaatcaatggattaattaatattatttaaaaaagtaaactattgccaataaaatatttatttctttatttatcaaggcaaaccaagctattgaataaatataattttttaaatatcattaaataagttttatttaagctttcatactttacaatagcaaagttaatcaaaaaatatctatgacggggcaaccaatgtcaaaaagagaaacgattataacaacagcaatgaccctttttaatcagaaaagttatacctctattggggtagacaaaattattgctgaatctaaagttgcaaaaatgactttttataagtacttctcttctaaagaagttttaattgaagagtgtcttcgccgaagaattttagaagtccaaacttctttattagataaagttaatagtgcagatgacccattaaataaactgaaaagtatttttaattggtatatcgactggattaacactgaagattttagtggttgtttatttaaaaaagcaacgatagaagtcctgcagctctatccttctattaaaaaacaagtaaataaataccgtgaatggatttacagtttagttttatctatatttttagagttagaaattgaagatccaaaagtattaagcagtctttttcttaacattatagatgggcttattattgacgggactattaacaaaccagaaattaactctgaagaaacatggtcttatataaataaactcattgaacttgaaacaaaacaaaaatatgaagccgcttaaaaaaatttaattattacggccctttaccatattataagttttatttttgaagatgagaggagctgtaatacatgctctatcaggtgatcagatctgttttttatctggttcaatataatgttcaggttgatatgttttaaaagcataaccgcctgaactttatataaatttagttattctaaatatatcaattaataaacatatagattttaataagttaatctttaagaaaaataccctttaaaatataagcgaataacagttctctcgtatcacccctagtttcatctagcagctgaataatggcaccatctaatgtaaataaaaacatatcgctatcgcttttcgtagtgtctttcttcacagttaaaagcaatttataaacttcagtagttaaccaatgccgatattgtacaaccacttgataggctgcgggatagagtttctcaatttcaaaaatagccctaaatagcaagtggtaataaccatccagattagtatgtaaaaagaaaatctttttgagtttttcacgcaagattaaatctttttgtatgtaaatgattgagcgcacttgttcttttaagacgtctttttgaaagtgtaggcacatttcaataagccgttctttagagtggaaatagttataaaacgaagcttttggcacctctgcttctcgcacaatgcggtctactcctacattatgaaaaccatgtttattaaaaagatatcgagacttatggagtacgcttaacgcgcgaaatgagagatctgaatatgacatatagttaccgttataaaataatttcttgttgtgtatagagataaaatgactgcaacttttgctctaagcaaaaaaagcatgcaaaggccccaaagactgcgctaacgcatctcaagttttattgttgatatgattttttagtcgtgaagaactgatgcctgaaaacctaaaggtgatcaaactgcataaagactaactgggaggtgtaaaaatagtatgcatagccaactccttattttgggagttctgccaaagcattaataaaagattatggtggcagaacgagcaagggttcgcagactgatagtaaagaatcagcacacccaaaggtgtccctcactcgtcctaccgcaacgagcgagggacgattgtacacacaagactactcctcagagggaataatctgatgcctttactaatcggtctgcgacaaccggctggcaatgtaggccagcaggcaaaggataatctgagagtttaaaagtgtcaatgtggaatttatgacaagttttaaaaattcttattatttttcattagattaactaaattattattttagatattatattaagtagtagtttttaaatttaaccaaatatctggtttaaacaaaatgagcaccttgcgactgaatcagttgccctacatttacaggcatacccaacaaataaccttggaactgctgacagcccaagcgtgttaaaatctcaacttgttgctgtgtctccaccccttcggctgttacggttaaacctaactttttcgccaaatgaataatactttctaaaatgacttcttcttttgagcccggttttaaatcgacaataaatccacggtcaattttaagttcatcgactggtaaatcttttaaatataagaagcttgagtgccctgttccaaagtcatcaattgccacacgaatgcccatatcgcgcagtcgctcacaagcacgaatgcttaagtcgatatgccgcattgcggttgattcggtaatttcaataatgaggtgatgcggctgaatttgatatttttttaacaaaccttcgagagtactaaagagctttttattttcgaaccgcaaggcagataaattgactgcgattggataaaactgcgtattgctacgttcccattcctgaatttgttggcaagcttgctcaagcgcccaatatcccattggaataattaaacctgtcttttccgcgccaccaataaacatatgcggtgtcagcatacctaaagatggatggttccagcgaatgagtgcttctaccccacaaatctcaagattggtattaaattttggctggtagtagagaacaaattgtttttcttcgactgctttgtataaatcattgatcagttttgactgacttcttgtttcttgttgatgggtagaataactaaagacggtataagtattgcggccctgctctttagacatcagcatggcagcatcggcattcattagcaggtcttgaacattttgcccatgttcagggaatagtgcgatacctagacttgctgaaatattaatttctttaccggaaatttggtaactgtcttgaataagatgtaatactttttcagcaagttgcattgcctcttcagtatcagtgttttcagcaatgagtaaaaactcatccccaccaattctaagcaatttacatttttcattgagttgccaatgtaaccgattggccatttgtataagcagttgatcaccaatgtggtgtccaaacgcatcatttaccgatttaaaacggtctaaatcaatatagagaaaagcaattttttggtctttataacggtgatctgacaggaggacttcggcgtaatccactaaataaagtcggtttggtaatttagttaagttatcttgaatagaaaggttggctaattctttattggctttgcgcagttctagatttcgctggttcagtcgttgttccagcacggcaacaataaaactcgcgaccagcaccagacaggtaaccaaaataattgtaaatagtagcaagtcatgttcagcctgatattggcttacaaacttatcggtaatatttgtcgaaataagtgccgtatagtgcatccccataatacttagggtcatcatcactgcaaaggctaattttaaacttatacggtgccgttcactttcttttaatttataggccagcaagaaagctagccccgacccgctcatggcaattaagacagaaaataaaataagaaaggaagtgtagtctttcttataaatatcaatattccagcctaacatactcacataataagaagcagaaattccaattcccataatgactgagcttaaaatgagtctaaatataggaagtgtaaaacgagaagtcagccaaattgcgacacttgaaagtacagcactaattccaaaagccagtgtaattaaaggaacgttcgaggaagctgcttcaaataaatggtaagcatgcatgccgacaatatggacaatactaatcgctgctgcgagtaataatccattgagtaatagaataaacggctcaatctttttataagtttgcttaaatattaactgctccatggaaatcacaatatagcaaatagcgccagccgcaataaaagagccgacgatcaatgtgctatcgtaatcaacatgacccatattggacttccatgattattcaatacttttttttattttgttcaactcattgcacaaaatacaattaaacacgttaaagaaaaattagtaaattcgacttttttagtcagttataaacaataacattatctaacatttggtcaagtattttttactttagaaatcaataaagtaaacaaaaattaagcatccaattatatgaaaaatataggatttcttaagtctaggtcaattgaccttaatgatgtttttttaaacttgttttaggggctaataaaataaaaaaccctgcatttagcagggttcttttaaaaacaatagaaaagaaaattagtttttctctttgtctacgatcttgttcgcttgaatccaaggcatcatcgcacgtaatttagcaccagtttgttcaataccgtgtgcagcattttgacgacgacgagctgtcatagatgggtagtttaacgcaccttcttggatgaacatcttcgcgtattcaccagattgaatacgttttaatgcattacgcattgcttcacgagactgttcattgattacttcaggaccagttacgtattcaccgtactcagcattgttagaaactgagtagttcatgtcagcgataccgccttcgaacatcaagtcaacgattaacttaagttcgtgtaagcattcgaagtaagccatttctggtgcataaccagcttcaaccaaagtttcgaagcccattttcactagttcaactgcaccaccacaaagaactgcttgctcaccgaataagtcagtttcagtttcttcacggaatgaagtttcgataatacctgtacggccaccgcctacgccagaagcgtaagaaagcgcaacgttacgtgcattaccagaagcgtcttggtgaattgcgattaggtcaggaacacctgaaccacgttggaattctgaacgtacagtgtgaccaggagctttaggcgcaaccatgattacgtctaagtctttacgtggaacaacttggttatatagaacagagaaaccatgagcaaatgctaaagtcgcgccttctttgatgtttggctcaatcacgtcacggtaaagttgtgattggaattcatctggagtcaaaatcattacgaggtcagcttgcttaactgctgctgggacttcagcaactttaagaccagcgttttcagctttcttccaagaagctgaaccagcacgtaaacctacagttacgtctacacctgagtctttaaggttaagtgcatgagcatgaccttgagaaccgtaaccaataatcgcaactttcttgctttggatgattgataagtcacagtctttatcgtaaaaaatttgcatttgtgttctccgctaaaatactttttaaaaaattaaatggctaaaactttttcgccacgggcgatacctgatacacctgaacgaacgacttcaagaatggtgttttctgcaagcgcatcgataaaaccatctaatttttcagttgtccctgctatttgaatggtataggtcgttggtgtcacgtctacaatttgcgcacggaaaatatccgcagtgcgtttaatttcagcacgtgaagcacccaatgcttttactttgattagcatgagttcacgctcaatgtgtgaaccttctgataaatcaactacttttaccacctcaacaagcttgttgagctgtttcgtaatttgttcgatcttatggtcatcgccataagtcgttaacgttaaacgcgataatgtcggatcttcggttggtgcaacattaagtgtttcaatgttgtagttacgttgactgaataagcccaccaaacgagaaagcgcaccagcttcgttttcaacgagtacagaaataatatgtctcattaaatgcgctcccctttagaaatccacatatcacgcatagattgacctgcaacctgcattggataaacgtgttcgctacggtcaaccataacgttgataaatacgcatttatcattgattgccattgcttctgcaagcttagattcaagttcatcggcatgattaatttgaatgcctacatgaccataagcttccattaacttggcaaagtcaggtaatgactcaacataagaacttgaatgacgaccttcatagttcatatcttgccattgtttcaccatacctaatgcacggttgttcaagcacaagatttttacgttcaagccatattgtttacaggttgaaagttcctgaatacacatctgaattgaagcttcacccgtaatacaaacaacttgttggtctgggaaagcaagcttcgcagccattgcataaggtaaaccaacacccatggtgccaaggccacctgagttgatccattggcgaggacgtttgtacttataataaagtgcaccaaacatctgatgttgacctacgtcagaagtaataatggcatcgccattggtcactttatataaagtttcaacaacctgctgtggcttcatagtgccatcagatggattttcatatttcaagccatgaactttgcgccattcattgatttgagaccaccaagccgcaattgcttcaggatttggtttagacacatttaattgttttaactgtgccaacatttcttgaagaactggctctactgcaccaacgatcggaatatgcgccataatcgtttttgaaatagttgcagggtcgatatcgacatgaatcacttttgagttcgggcagaatttggctgggttatttgttacgcggtcatcaaaacgcgcaccaatcgccaaaattacgtctgcatggtgcattgccatattggcttcatatgtaccgtgcatacccaacatgccaataaactgtgggtcatcgcccgggaatccgcctaaccccataagtgtgttagttaccggataaccaagtaaatgtgcaagttcggttaataacgcagaagcattcccttgtacgacaccaccacctgtataaataacaggacgttttgcagttagtaattcatcaattgctttacgaatttgaccagagtggccgcgtgaaggtggttgatatgaacgcatcttcactttttcagggtattcgtatgcaaacttttctgcagggttagtcgcatctttaggaatatcgactacaactggaccagggcgcccacttgatgcgatatagaatgcttttttaataattgcagggatttcacttgcgtggcggacctgaaagctgtgtttcacgataggacgtgaaataccaaccatgtcagtttcctggaaagcgtcttcaccaatcagatgtgatgcaacctggccagacaaaaccaccattgggattgagtccatataagctgttgcaattggagttactgtattggttgcgcctggaccagaagtgaccagtactacgccagtcttacctgtagcacgcgagtaggcatctgccatatgaccagcagcttgctcatggcgcacgaggtaatgattgattttgtcttgttgaaatagcgcatcataaatatgtaatactgcgccgcctggataaccaaaaacatgttcaacgccttcgtccgcaagagcgcgaacgagcatttcaccaccagataaaagttccaacgtgattcaccctaaaatcttatatcactattttatggaaggcataaatagtgtttcattcattgaattgtctgcactgttatagcacacatattgtctagttttcgttgcaatagaaaaatttctgtttttcagccgtataagctgttttaacattaataaagcatgtctggatatacatactttagtaaaatcaatctctcggctagagagaatgtctattacaaaacatgacagttattcgaagggtgatcgagtaaatgcatataaaactagagaaagcatttttgttgtttctatatacaaagtcaagaataaagaaaaggtttttccataaaaaaatttagctgctgcttttttaatctaatattaaatcgtgaatttactcttcttagctcattatttattaaaaattcattatttttatataaaacgatccattctaaattgcttatttataaagtttatttaaatatagtcagtttacattggggaagaactgatatgaatttatcttatttaaaaacaagcctgtatacagccgctacaacagcgattttactttgctcaagtcaaagtcaggcacagcaatattataaatggatggatcaaagtggctcgacacattacaccacgacgccaccacctaaaggagcgaaacatttgaacaaagtttcgacttacggcagtcaaccattgttgaaaaatccaacatcaaacttagaacaaccatctcaggataaagtcgtgcaagaagtaactaacgtagcagtggaaaaaggtgcacctgctgtcccggtcccacctgccccgtctgtatcggcaccaagataattaaaatgagagtggtgaatatttttaccactcttcgattatttaaaataaacaagaatagattgggaaattttatagcgcagattaaaagataaaatcctgctctaaaaactgacattttcctctattttgcgctatgctgtgcagcaatctttcatttcaattttcgttgtatagcttacgtctatgactatttctcacattgacccagaatatcaagcaaacacgattgaaccatcagtccaacaagattgggaaaatcgtaaagtctttaaagttgccgacactgtcgaaggtaaacatcgctacatcctgtcaatgttcccttacccaagtggcaaactgcacatgggtcatgtgcgtaactataccattggcgatgtaattagccgtttttaccgtttaaaaggcgaaaccgtattacaacctatgggttgggatgcatttggtttaccagcagaaaacgctgcaattgcccataaagttgctccggcaaaatggacatttgaaaacatcgcttacatgcgtgaccaattaaaaaaattaggtctatctgtagattgggaccgtgaatttgcaacgtgtacaccagagtactatcactgggaacaatggttgttcgttcagctttataaaaaaggtttaatctaccgtaaactttcaacagtaaactgggacccggttgaccaaacagttttggcaaacgaacaagttgaaaatggtcgtggctggcgttcaggtgcattggttgaaaaacgcgatattccaatgtactacttccgtattacggactatgcacaagaattattagacgacctagacactctacaagacggctggcctcaacaagtgttgaccatgcagcgtaactggattggtcgttcgacaggtatggaaattaccttcccatctgccaatactgaaatttatgctgacggcttaactgtttatacaacacgtgccgacacacttatgggtgtgacgtacgttgccgttgcagcagaacaccctcttgcgcttaaagctgctgaaaataaccctgaattggctgcatttattgaagaatgccgcatgggttcagttgcagaagctgacttggctacagccgagaagaaaggtatggcaacaggtttgtttgtaaaacaccctgtaactggcgaagagcttcctgtctggattgcgaactacgtattaatgtcttacggttctggcgcagtaatggctgtaccagcacatgatgaacgtgactttgaatttgctaacaagttcaacttgccaattaagcaagtcattgatgccaaaggtgctgacgatgcagattattctgctaccgagtggcaagaatggtacggttctaaagaaggtaaacttgttaactctggcgagtttgacggtctagaattccaagctgcattcgatgcattccttgcgaaattagaaccacaaggtttagcaaattctaaagttcaattccgtttacgtgactggggtgtttctcgtcaacgttactggggttgcccaattccaatgattaactgtgatacttgtggtcaagtcacagttcctgaagatcaacttccggttgtattaccaactgatgttgttccagatggttcaggtaatccactaaataaaatgcctgaattctatgaaactaaatgtccttgctgtggtggcgatgcacgccgtgaaacagatacattggacacattcgtagaatcatcttggtactacgcacgttatgcatctccagactttactggtggtatggtaaaacctgaagcagctaaaaactggcttcctgtaaaccaatatattggtggtgttgaacacgcgattcttcacttactttatgcacgtttcttccacaaattaatgcgtgatgaaggtgttgtacaaggtaatgagccatttaccaacttgttaactcaaggcatggtgcttgcagatactttctatcgtgaagcagaaaatggtaagaaaacttggttcaaccctgctgatatcgaattagaacgtgatgagaaaggtcgcatcatttctgcaaaatattcaggtgatggtcaagaagtgattatcggcggacaagaaaaaatgtccaagtcgaaaaataacggtattgacccacaagccattattgatcaatacggcgcagatacagctcgtgtatttatgatgtttgctgctccaccagatcaatctttagaatggtctgatgcaggtgttgaaggtgcaaaccgtttcttgaaacgtgtatggcgtctggtagcaagcttccttgaaaaaggaaactctgcaacagcaatcgataaagcaaacttgtctaaagatgctcaagatttacgtcgtaagacacacgaaaccattcaaaaagtaagtgatgatattgagcgtcgtcatgcgttcaatactgcaattgctgcattgatggaattgttaaacgcaagcaataagtttgaagcaaaagatgacaatgacgttgctgtagaacgtgaagcaatcaccacattgttaactttacttgctccatttgctccgcatttaagccagactttattggctcagtttggtacggacttaacagaagcaactttccctgaagttgatgcttctgcattaacccgcaatactcaaacgattgttgtacaagtaaatggtaaacttcgcggtaaacttgaagtttctgttgatatttctaaagatgagttattagctcaagcgaaagcattaccagaagttcagcagttcttaacaggaccaaccaaaaaagagattgtggttccaaacaaattggttaacctcgtggtttaattacaggtattaatgagaggatcaagcatgcacttagcccaacgtttagccgctgttgttttaaccttaggccttagtgcaggcttagtcgggtgtggtttccatttaaaaggaaccaacccgactgcgactccacttgtttataaaaaattaagccttgagttaccggcaaaaaccgatgaccttgaaacacaattaaaagtgtatttaacggcaaatggtgttcaactcagcaatgacaacgacgcctatgttcttcgtgttttagaatacacgcctcgtcgtcagcttctaaatggtaaacttacagaagtgttattacgcttgactgtaactttccaaatcgaagatcgtcaaggtaataaaattacagagccgcgtactttaaccgcagctcgtagttatcaatatgatttggcaacggtcaacactgagaaccagcaagagagttacttgcaacgtattgtaattgatgaccttgcacagcaaattactcgtcaaatttcagccaatcgcttaccaaaagctcaaccatagacgtatcttttcttaagtaatgaaacttgactatttacaagccctcaaacgcattccggaagctcggggtgcgtggatcctgcatggacaggaacctttattagaacaaaatttactcgacactttccgcaaaagctggcagcaacaagacattgaaagacagcgctacgatattagtagtgtaagtgactggaaaaatgtctttaatgcactgaacagcctatctttattttctcagcaacttgcgattgaagttcacggcaatatcaagcccgatgccaatggtttaaaacagctaaaaagttatatccagcataatgaaactaacctgctgttaattgttttacccaaacaagacagtagcagcttaaaatctgcttttttccaagttgttgaagcgaacggtgtggtggttgcccttactgctaactatccgcaagaccgtcaacgaatattagccgctgaggctgagaagttagaaattcaactcgacaatgatgcttggcagtggctcatgcagcatcatgagcataacctgctcgctgctaaaaatagcttgatgcgggtaagagatacttttccagaccagaaactaattcaaattgaacagttatatgcatgtctacaagatcagtctcgttacaccacttacgatttaagcgatgcgttattagaaggtaatcttgctcagtccattaagatctttcaatatttaatcggttccggtgaaccggaaagcttaatcttatggacattaagtaaagaaatgcgtttattaatgcagttgtttgaacaaccacataatgcattacaactgggtatatggaaaacaaaagttagcttataccaacaagcattaagaagactcaatccacagcaatttttgggatggtctgccctgcttttacaaattgatgccgcaatcaaaggcatgtccaatgagaatgcccaacatttaatgcaacaagccattgccgagctgtgtggaaaaacattatttatacattagggcagccaaatcatttgcctgctttattgaaatatcataaaaattcacgttttatcctcatttgactcttatactaagttaaattttagacttttcgacctctcgccatgccaaaaataaagccaattaaactcgtaattattgtcgtctgtatcgccattattgctgtcttagcttggaaattcttaaagcctaaacaacagcaacctcaatatattacagcagaggtaactcgcggggatattgagaataatgtacttgcaaccggtacacttgatgcaaccaagcttattagtgtgggtgctcaggtatctggtcaggtcaaaaagatgtatgtacagcttggtgatcaagtaaaacaaggtcaacttattgcacaaattgactcgaccacccaagaaaacagtttaaaaacatctgatgctaatattaaaaatttagaggcacagcgtcttcagcaaatcgcttctttaaacgagaaacaactcgaatatcgtcgtcaacaacaaatgtatgctcaagatgcaacacctcgtgcagatttagagtcggctgaagctgcttataaaacagctcaggcacaagttaaagcattagatgcccaaattgaatctgcaaaaataacgcgttcaacagcacaaactaatattggctatacacgtattgttgcaccaactgatggtacggttgttgcgattgtgactgaagaaggtcaaacggtaaacgcaaaccaaagtgctcctactatcgtcaaaattgcaaaacttcaaaatatgacgattaaagcacaggtgagtgaagccgatattatgaaagtggaaaaaggtcagcaggtctatttcacgaccttaggtgatgaaaccaagcgctatgcaaccttacgtcaaattgaacctgctccagattcgatctctagtgaatcaaacagcaccacaagttcaacaacaagctcagctgtttactacaacgctttatttgatgttccaaatacggacggcaaattgcgtattgatatgactgcacaagtttatatcgtattaaattcagcaaaaaatgccttattggttccatcttctgcgttaagtagcaaacaattttctggccaaagaaaacagggtcaatcagcagataaagcgagttctactccaagtgcagaacgcaagcatcaaggtaatggtgttcgtttagaacgcttaaatttaactcctgaacaaaaacaacttattgaacaaggcaaagcaacactaagtgtagttcgcgttttacaagcagatggtacgactaaaccaacacaaattttggtaggtattaataaccgtgtaaatgcacaagtacttgccggattaaaacaaggtgaccaagttgtgatcgctgatagttcagaaaactctgcagcttctgcaaacagtggtaataaccgtcgccgtagcggtccaatgggaatgtaagcatgacaaaacaagctttgcttgaagtcagcaatctggtccgggaattccctgctggcgaaagcacgattcaaattttaaaaggcattgacctgaccatttatgagggtgagctggttgctattgttggccagtccggctctggtaaatcaacgctcatgaatattttgggctgtctggaccgcccaacaagtggtagttataaggttaatggtcaagaaaccggtaagctagagcccgaccagttagcgcagttacgccgtgaatattttggttttattttccagcgctatcatttactgggtgacttatcagctgaaggtaacgttgaggttccagctgtttatgctggtgttactccagcagaccgtaaacagcgagctactgccctgctcacggagttaggtttaggtactaaaacgcaaaaccgaccaagccagctttcaggtggtcaacagcaacgtgtatcaattgcacgtgccttaatgaatggcggcgatgtgatcttggccgacgaaccaacaggggcactcgattcacatagcggcgttgaagtgatgcgaattttgcgtgaactcaacgcggctggccatacgattattttggtaacgcacgatatgcaagttgcaaagaatgcaacgcgcattatcgaaattagtgatggggaaattattagtgaccgtcctaatgttccagaccaatctttagaagaagttaaatctgatccagatgcagcacctgctttacaaaataagcagaaaaaaggcaaaagtatttcggcttggcgttcaaccctagatcgcttatccgaagcctttcaaatggctttactgtccatgaatgcccaccgcatgcgtacttttttaactatgctggggatcattattggtattgcctctgtcgtaacggtggtcgcactgggtaatggctctcaacaacagattttgagcaacattagcagtttaggcaccaacacaattacggtattccaaggtcgtggttttggtgataactccaagacagccaattttaaaacgctggttcctgccgacgccgatgcattaatgacacaaccttatgtcagtgcagtcagcccgatggtcagtacatccaagaccatgcgttatcaacaaaatgaagcaaatgcgactattaacggtgtaagtaacgattatttcgatgtaaaaggtctagtttttaaagacggccaaacctttgatcaacgaagtgtccgcgaccgttcgcaagatgtagtcattgataccaatacgcaaaaacaattctttagcgatggtactaacccaatcgggcaagtcgtgttactgggtagcgtgccagctcgtattatcggcattgtagaacctcagaccagcggaatgggttcggatgacacgctgaatgtatatatgccttataccacggtcatgagccgtatgttagggcaagcgcatgtccgtaatattatcgtacgtattaatgataaatactcgaccagtgctgctgaaaacgccatcgttaacttattaacccaacgccacggtgcccaagatattttcaccatgaacagtgacagtatccgacaaaccattgagaaaaccacaagtactatgaccctcttagtatcagcaattgctgtaatttctctggtagttggtggtatcggtgtaatgaatattatgctggtttcggtgactgaacgtacgcaagaaattggtgtgcgtatggctgtgggtgctcgacaaagtgatattttgcagcagttcctgattgaagcaattttagtatgtttgattggtggtgtacttggcgtactgctatcacttggcttaggacaactgattaataagtttgccggtggcaactttgctgtcgcctattcaaccacgtcaattgttgctgcgtttgtgtgttcaacattgattggtgtcgtattcggcttcttacctgccaagaatgcagcaaaacttgaccctgttgcagcactatcacgagaataaggaaaactgcatgtctttttctatgactaaacttagcgcagcacttctcctcactagttctcttgtgggatgtgccgctgtagtaaaaacaccttaccaagcaccagctgtacaagttccgggtagttttcagtacgataaggctaaagctaaaacagcatcggttgagcaatattctgaccgttggtggacattgtttggagatgcacagctcaaccaactcgtaactaatgttttagagcgcaatagtgatttggctgttgcgggaatcacactcaagcaagcacgcttgcaagctgatttaaccgcgaataaacaaggcttacggaccaactctagtgtttctacaggacattctttcgacttaaattcgggagatgacagcgcgaaaggtttatcaatgagtgctggggtgagctatgaacttgatttgtttggcaagcttgctcgtcaaactgaagcaagtaaatgggaagccttagcaaccgaacaagatcttcaagctactggtcaaagtctgattgccactactgcgaaactctactggcaactcggctatttaaatgaacgttatgcaactgcgcagcaaagcttagccacttcgcaaaagctttatcaattggttcaaactcagtataaagcaggtgcagtttcaggcttagaccttacgcaagccgagcagtctgttcaaagccaaaaagcaagtttaagccagattgagcaacagcttgttgaaacgcgtacagccattgctgtgttattgcatgagccagtacagcaactcaatattcaagagccacagcgtttaccacgtacagcgctgcctgctattggtgcgggtttaccagcggatattttgtcacgtcgcccagacttgcaagcagctgagcttcgcttgagaaaagcactagcaactaaagatgcaactaaagcaagctactacccgtcaattagcttaaccagtagtttaggttcaagcagcacatcgttaacggagttattacgtaaccctgcccttacgcttggagcgagtttaagcctaccgtttttgcaatataacgatatgaaaaaagatatcgcgattagcaacctagattatgaaaaagcgattattcaatatcgccaaacgctttatcaggcttttgctgatgtagaaaacgcgttatcaagccgcacagaactcgacaaacaagtagcgttacaagagcgtaatgtcgaacttgcagaaaaaactgaacgtttaactgaagtccgctaccgttatggcgctgttgcgttaaaaacacttcttgatgcacagcaaactacacgtactgcgcgcttgagtcttgttgaaaccaaacaaagccaatacaacgcttatgttacccttatgcaggcattaggcggttcacctgtaaaagaactgccgcaataacttgcgcccagtaaaaaagccgtagtccttcaactacggctttttttatgtctgaataaatcttaagacttattcatcatccatcatagattggctcatacctacagtattgaaaccagcatctacatataggatttcaccagtaatacctgaagcccaaggtgagcataggaataacgctgcattacccacttcttcaatggttacgttacgttttaatggcgcaactttttcgttagcatctagcattttacggaaagatttaataccagaagcagccaaagtacgaattggacccgcagaaattgcgtttacacggataccgtcaacacccaaacttgatgccaagtaacgaacgccagcttctaaagatgcttttgccatacccattacgttgtagttaggcataacgcgctcagaaccttggtaagtcaaagttaataaacaaccttggcgagcttgtaataaaggttttgcagcacgtgccattgcaacaaagctgtatgcgctaatgtcatgagcaattttaaaaccgtcacggtcagtcacgtcagtaaagtcaccgtcaagcgtgtgtgcaggtgcaaagccgattgagtgcacaacaccgtctacgccgtcccaatgttttgcaagttccgcaaatgcattatcaatttcagcatcaacggcaacatcacatggaaacacaagcttagaaccgaattgctcagcaaactcatctacacgtttttttaatttttcgtttggataagtaaatgcaagctcagcaccttcacggtgtaatgcttgtgcaataccataagcaattgataatttactagcaacgcctgcaatcaaaaagcgtttacctgctaaaagtccttgtgtcatgccgatctcactcaaaacaattttcagcataatgccaatattcaacgtttttcgaaattgcataatgcatcttttttcaaaaatcgcacgaaaaaaaatcgctccgatttaggagcgactttttaccaactcatttctagtcgtcagacaataagccaagtaaacgtaagaaagagatatacatccatactaaagttgcaagtaaggcaataccacacaaccattccatgaattttggtgcacgatatgctgcattagtttcgatcaaatcaaaatctaaaattaggttcagtgaagcaatcactgcaacaaaagcagcaaaaccaatacctaaccagttgctttcaaaaatataaggaatgcttgagccaaacgctaaacgcatcaccatctgcacgataaatacaataaagatcgccagagatgcagagatcacaactgatttgaacttttcagttgcgcgtatgatttgaaacttatatagaccaaacatcaccaaagtcgtgacgaaagttgccaataaagcttgaagaggaacgcccggatatttcaactggaaagtaaaagaaataccacctaagaaagccccttcaaataaagcataaggaattgccaaagttggagcagttgttggtttaaaagtcgtaattaaagctaaaaccaagccgccaattgcacccacaattgaagccgcataagcaataccaacatttgcagtaaaggctgcatagaaaaataaagcgacacccactgcggctgcaatgatggtcaacatcacagatttttgaatcgcaccttgcacggtcatcggttgactatagtcactgaccgtttcaacgcgtgtcagtatcgggttattactttgcataaatgctctctttttataataaataaacttaaaacatcattttaagcaaaatgaatatgaaagccaaattcccacttggcattattgtaacaatgtcctttaaacaataaaaaagggagctttcgcccccttttcttcttacttgaataacctaatcaatctttaccgtcagtattcataatgaagaagtattcgcggtaatacttaagctcagaaatagaatcacgaatgtcatccatcgccaaatgtgatgcattttttttcagaccactcataatttcaggacgccagcgttttgagagttcttttactgtagatacgtcaagattacgatagtggaaatactgttctagttcaggcataagacgatgtaagaaacggcgatcctgacaaatcgagttaccacacattggtgaaacttttggatttacccatttttttagaaattctaaagtctgtaactcagcatcacgagctgtcaatttactacgacgaactcgttcaattaaacctgactggccgtgctgacgcgtattccactcatccattgcatttaaaatacgatcaggttgatgaatagccaaaaccggaccttcggcaagtacatttaaatgatcatctgtaataattgttgcaatttcaataatctggtcgttgtcggtatctaaacctgtcatttccagatcaatccaaattaatcgtgtatttaaagtactgctcatgaatgtacgttctaaagtgccgtaaaaacatcaatagtagcaaatttcttgcttctgcgctgtaattccataccagcttcgtgctatttttgcggtcttcaaacaatggtttttttgggatatgaatggctctaattcgtaagcgtcgtttaactgagcaacagcaacgtcgtattgaaaaacagcataaaactcgccaagaagaagtcgatacttcacaagatctagatgggctggttgtacagcactatggacgtcaacttgaagtacaggcactttctgtacccgatcatcacccagaaaaaccgcaagtcgccgaaggcgaaccagaaccgttttggaaacccattgaattaaatagcgtttggcgctgtcacacccgtacaaaccttgaattactggtcactggtgaccgagtgaagtggcaagctgaccctaatacaggtttagggattattaccgcaattcatccacgtacttcattacttacacgcccggatcgctatcacaaagtaaaacctgtagctgcgaatatcagcttaatcgttattgtttttgccccactgccagaaccggcacctactttgattgaccgctacttagtggcatgtgcagatgcgaatattccggctcttttagtgcttaataaatcagatttactcactgaaaatgatccgattctcgacatgctcaaagagtatgaaaatttaggctatgaagtcatgatttgtcattctaaaggtgacatctcagcattgtcccagcgtcttgatggcgagacagtagcttttgtaggtcagtcaggagttgggaaaagctcacttattaatgtgctcattccagatgctgaacaaaaaaccaatatcatttctgaaaactcagcacttggacagcacaccacgacttctactcgtttaatcaactttggtagaaatggcgccttgattgattcaccgggaattcgcgagtttgggctttggcatctcgatttagataaaattcgtatgggcttccctgaaatcgaagcacatttaggttcgtgtcagttccgtaattgcactcatactcatgaaaagaactgtggcttaaaacaagctgttgaagcaggtgaaattttaccacgccgcctagacagctttttacgtttaatcgatgagattcaagaagcgcagcaaaaaaactaattttctaccccatttgcccttgaagtggtgattttgatcaccatctatatacgctatactctaggtcaattttgtttttaatttttttaggtgacttgtggaacgctggttagagtttatggggaatcaccccattttgtttggtacactcggagtcttgatcgtattgttcttcatttttgaaggtcaacgtaacggtcgtaaaatttctccacagtcgcttggtattttagtgaaagcgaaaaatgcccttttgattgacttacgcgatagcaaagacttccgcgaaggtcacattagtggtagccgcaatattccttatagccaaattgcaagtcatgctgatgaattaaaagcaagtgaccgtccattggtatttatttgcaacctagggcaagttgctggtagcgctttacagaaagtcgctcaccatgacagctatcgccttgatggtggtatcagtaactggaaagctcaaggcttacctctcgttaaaagcaaaccaaaagcttaaggagaattgttatggcagcaaatgtcattgtttactcaacttctgtatgcccgtactgcgttcgcgctaaacaattacttgagcgtaaaggtgttgcttacaaagaagtaaatctttctgttgaagcgccagaagtacgtgctgaattaatgcaacgtacaaatcatcgcactgttccacaaatttttattaatgatcagtttatcggtggttttgaccaactttatgctttagagcgtgaaggtaaactcgacgaattattggcttaacatcgcatccatattaaggaaaaaacaatgagcgaagaacaacaagttcaaccacaattagctttagagcgtatttatacaaaagatatttcttttgaggttccaggggcacaagttttcactaaacaatggcaacctgaacttaacatcaatctttcttcagctgctgaaaagattgacccaactcactttgaagtatctttaaaagttgtggttcaagccaataacgacaatgaaacagcgttcatcgtagatgtaactcaatctggtattttcttaatcgataatatcgaagaagaccgtttaccttacattttgggtgcatactgcccgaacattttgtttccgttcttacgtgaagcggtaaacgacctagtaacaaaaggtagcttcccacagttacttcttactccaatcaactttgatgcagagttcgaagcaaacatgcaacgtgctcaagctgctgctgttgaaggtcaagcttaattttatagcttaccctaaactcaaaaaaccgcgtaattcgcggttttttttatgagagtaatttagatttaacggtcaagtgaatgaatctgaatagaaggaaactggaatccacggcatgattgttctgaacgccatgcgactgttaagatcatattacctaacacaaagttttggtaggcaaatgtcccaatgagctcatgcgaacataatccgccatgatttgtaggatgtgcttgggtgtttaaggtatttaaatctaaacgtataccaagacccgatgcttttaaaacagcttctttagtcgtccagactttaaaccaatattccctatcttgttctagactttgccacgttgcatattcatcaggatgaaaagcatgttgtgccagactatccagacgtactttacgatcaagctcttcaacatctacgccaatatctttaacatgttcgctcatggctaaagcgtagtattgttggctatgtgagtgattaaaatgcaaagtgtgattcaataaataaggtttaccatgttcatgcttggcaaactccaattccgttgaattgaattgtagtttctctgcaatcagtcgatttctgacactctgtatttgttgttttttataatgattaaatgaacggaagtctggaaaatcttgtttagactttaaaagaagctgagataatgcctgtgtatagacttcaattttgcgcttagacattatctcgaccttatttaaaattaattaaaatttaaccacgtcgccttttaatgccacacccgccatcatggcgcctttatagcaatcgtaagtggtcgtactcgttgtttcattggctttaaaatagctcacaatattggtaacggcgtttgccccttgtgctttagcattgttttgcatttggatcagtgctgaacgtaaaacccagtcacaagaagttgctgctgacttaccaaaaccattggtctttttattggttaccgcatctttttgaatgattttaccgccagactttgtaccctttaaataaaactttactgaaccatctaaagtcccatctgcaactgcacggtctacagcttctttaaaatttaactgatgtacttcatctccagcctgaacagtggcagtaaaacccgcacttagcattgctacaaataaaagttttttatttaacattgttgtgttccttattgtttaacacgtttaaaaataagcgaagtattaattccgccaaaagcaaagttattgctcataataatgtcagcatccaaatttctcggctgctgaacgatataatctagttcaccacatagtgagtcgatttcatctagatttaaagttggaataaaacggccacgattcatcatttcgatgcttaaccaagcttcaatagccccacacgcccccagcgtatgtccaaaataactctttaaagagctaattggtttatagcctaaaacttttgcagtggcttggctctccgccacatccccctgatctgttgaagtaccatgtgcatttacgtaggcaatgtctttagcttctacagatgcatctttaagcgctaactccatacagcgccccatcatttctgattcaggacgagttacatgttgaccatcggtattactaccatagccaatcacttctgcataaatatgggcacctcgtgctttggcatgttcatattcttccagaattaaacagcctgcgccttcaccaatcaccaatccatctcgtttagcatcaaatggtcgtggtgttttttcaggttgatcattcattccactggtcgcgaacaatacatcaaaaactgccgcacctgccgcactgagttcctctgcaccacccgcaatcatgacctgttgcttaccatatttgattgcttcatacgcttgcccaattgccatggaaccagaggtacacgcgcttgaggtaggtaaagttaatccttttaggccaaaatatacggtcatgttcaccgcactggtgtgggccatcatgcgaatataagtggttgcattaatcttactcatgctctggtgaagcaacatgcttgcaaactcacccacggcatctacgctacccgcagaagacccaaaggcaacacccgcttcgccactagataaaatttcatgtccaagcaaaccagcattttgtaacgcagtttcggcacaaaccacagacatgagtgctacacgccccataccacgggtaaccttacggttaaaatgttttggaatatgaaatgtttcaacaggcccagcaagcttggtccgaaggtcaacatattgctcccactccggcatgtaacgtataccgcttttgccggcttcaaatcgcgcaaagatgtcatcggcagtttcacctaaagaggtaattcctgccattcctgtcacaactacacgtttcatcagatgagtcctccattcacagagatcacctgtcgagttacatatgaagcttcatctgaacacaagaatttcactacgctcgccacttcatcaacctgtcccatgcgttgcagcggaatcattttaagcgcatgttctttgacttcatctgtcaccatttcggtttcgatcagtccaggagctacacagttcacagtaatttttcgcttcgccaattcgagtgctaaggctttggtcgcaccaatcagacctgcttttgcagcactatagttaacctgaccacggttacccataattccagacacagaagataaagtgacaatacggccacctttgcgtaagtgaatcattggcatgatgagtggttttaaaacattatagaaaccatctaaagaggtcgaaatcacttcatcccaatcttgatctgttaacgcaggaaaggccccatcatgagtaagacctgcattcaatacaaccccatagaatccgccatgctgctctacatcttgctctaaaatctgttgaaccgtctggcgttcatttacatcaaacattagataatggctattttgtcctaatgcttgaatctcttgtacgacttgctcagcctctgcctgacgtgaacgcgcgtgcacagttacatcaaaaccagcctttgccagctgtaatgcaatcgctttcccaattcctcgacttgaacccgttactaaaattcgtcttgtcacaatgtattcctaattctttgtggttattcaaatggtgattctgttggttcaaatacacttaacgttgcctgaatgcagtgctcagcatattgaatttcacaggaaaattgcccaagtccttcatgaaaatattgttgctctatttggatgatcaattgtgaacctaaggagaaataagggatgggtaaatttaatttacgtgttcccaataaaaaaccgacttttggtgcttgttttgactgctgaccttgccagcctgaataagcactaattgtttgtgccataatttcaatgcttgcccatgtcggcaatccttccgcttcacaaaacatgagctctggtgtaatcgtgagttctgcttgtgcccgcccttctgcaacctctgttaaatggtcaataaataccatcggttgctcatgaggaatatattgaattgcatccagtttcattagggcttcactccaaaaacaagactaatattacttcccccaaaagcgaaagaattactcatgacataacgaatgggctgtgttaactcggcttcttgcacatagttttggtcgaccaaatctggatcaatctcaacattttgatgtaaaggcaaccagctttgatcttttaaaacttgctcacaaataaaagcttctatggcacccgctgcaccgagacaatgtccagttttatgttttgtactacttaaagcaacttggtaaacaccaaaaacttgtcttacagccttaatttccattgcatcattttgtggagttgcggttccatgcaagttgatataacccacctcttgagctgaaatatgtgccatatctagtgcacgttgcatggctaaagcggcacctttaccttccggatgtggagccgaaatatgccatgcatccatggtctcacccgcccccattaacatgacaggtgcttgttctttacttagtacaaaaaacgcagcggcttcaccaatattaataccatcacggcttatgccgcagggttggcaaatatgtgcagataaactttctagactattaaatccatttagagtcaatttgcacaaggtatcgacgccacccaccagcacaacatctgctaagtctgcgtgaagtaatctctgccctgcggctaatgctttagcgcttgaagaacaagctgttgaaatcgtatatgcaggcccttcccatcctaagtactgctgtaatgctttcgctaaacagctcatttcttgaggatagtgtgatatcgatagatctgtttgcccttgaaaatattgcttaagtaataattcattatctgcaataccagaagtagaggtgcctaccacaatggctaaacgtttattttcaaaggaagcagtataagcttttaactctgtttcgattttagataatgcagttaaggcaaaacgtagattacgtgaatctacagaccgcatagcatcaggtacgctcgaacataatggatgcgtatattgccccacccaaacatcacgatcagcgattaaatcatctcgcaaactcaaggtttgctgcggctgttgtaatgcctgtttaatttgattaagttcgcagcctaatgcagataaaccaacactaaattgtatgcctactgccattggagctgcattttctgaaggtaaatgtttcatggcgtaggactttcttctgtctgcaaggtgttctcaatcgaactcagcatcatggtataagggacttgttcattaatcaattcaatacttccttgtccctgtttaagctgtaacacaggctgcttttcaatataaacaacttgcttatctgcttgttgtttcatctctacagcttgttgccctaaatgcgaaaactgagggtatgtcgcaaacaaaagatcacgtaccacaaactcaaaaggcaataaacgcatctgatcaatgcgttgttcaacatgaactcggtgcccatcaaactgtaacttaaataattgctggcctgtcaggcttaaagcgaccatatccagtacagcgcccttttgctgttgatataacaagaagctaaaactttgctgcttccactggacctcaacctgatcttgtctttgataagtctgagcctgccatagtggactttgtagccctttggcatgtggcatgatttgacaaccatttaaaaatatcaagctactgagtaatatcgttgcccatttgcgttgcatggttatccctcaagtacctgttcttgcgccaagccttcacgacaatattctgccaaagtgctgagtctacgtttggcatttttatggatcgggtttttttcatcccacgcataaccagccaataatgaagaaatcatacggcgaatgccttcattctgattttgcgaaaacaccacatcttggaactcatcttcgtaccatgattcaacataggcacgaaacacctgaataccacggcgtaatggtttttcatattcttctaaccagtcgacttgctgaccttgcaaaactcgttcaaccaaaggaaccgccaaacttgaagatttaagagcaatcgtcacacctgatgaaaagactggatcaagaaactcacccgcattacctaatagcgcatagttgtgacctgccaaatgttttacattcgctgagtagcccaccaaggtccgcactggcgtatcaaactttgcacggcgcaagacatgtgacaagcttggttcatcggccaaaatacgcttaaacattgcctcaggttcattatcttcagcattttcgaccatgtatttgtcaaaaaaatcttgttctgcaacaacaccaaaagaagctcgtccatctgcaaatggaatcagccaataccatgcacgatgatctttttcatggacagtaattaaaattttattacgatcaaactctgggtcatctgtaattccgtcttcaatatgggtaaacagcgcacgtcttaccggaaaatttgatggactttctagatctagtaactttggcaaaattcgtccaaagccactcgcatctaacaagaatttagtttgaattttataacgttgttgttctttatctaatacagttaatacaggctgttcagatgcaacatcaacatctaaaacctcatgcccaaagcgaatatccgcaccataagcttgagcctgttttgctaataagtcgtcaaaatctgcacggcgaacttgccaagttgtgcctggaccatcggtaaatttttctgtaaagtcataaaaactacgctgtttgccacgtaaaaaagccgcaccatttttaaattgaaaagcgtattgttcaacatgttcacggactgtttctaataaaccagcttcttctaaaaataccatagattgtggtagcaatgactcaccaatcgaaaaacgagggaaatgctgtttttcaatgatcgtaacggtatagcccttttttcgaagaagtgcagcagcagaactacctgatggcccagccccaataatcacgacgtcaattttttctatagtgctcatagcacaacttcctttttaatttattcaaattatgaatggtcttgtaaattcacgatatgtttttcatctgcgggggttaacaaagtcgcatagataaacgagaaaataaccccgaataaaaccgttaaaccaaaacaatgaattgcataagtatggctaaatgaaagtaatccaaagccaagtaaggtcgacatcatacataaaaataatgccattccaactacttgagggtgatcatgtccatgtcggtagaaaattgcatagtcgacaccaatcccaataatcagaaaagtcgccataatactaaacaggttaatctcgacacctaaccatgcctgaacagcaaaagtgcttagtaaagccaagctgactggcaagaccaaaggtacaatcgaacttaatccataaataagcgctaaaccaactgccagaccaattaaggcataaatcagaagatgttgagcctgcactcgatgttcagcaaacatttgtgacattgcagtaatcggttgctggaaatgtatatgctcattctgaagttgctttaacgcgtcaggttgtttcacccctgtcaccataactaatcgctcattggcttgaggttgtaaaaaagctaaagggtgatctttaaatactgaaaaatctaataacggttgtgccgctagttgctgttgccactgtaaaacatcagtgacatttaggcccatactttgtgcatattgctgcaaagtcgcttttggaatatttcttaatagttgtagattattttgctgctctgccaatggtggaacccattgacctaaagcttgaaatgcactgatttttccgtttgtttgcaactgttgtaattgccctatcagttgctgctcttgttgctgcatttcatttgccgatgctgcacgcaccacaaaataatcactactttgttgctggccaaattgctcacgaaccgcttggtcctgcaactttaaactcgcgtccataccttgtaagttacgaatatcatcgttacttttaagatagaaaagactcgacgtaccgactgctaaaatgattgcaatcaagccagaacgaactttggttcgttgctgaaaccataaccgtgcttgtccaatccacgatagtgcttgtatagcaggctgagcattgagtgctggtaatcttggtaatagcagtacactactgatccacgccgcagttaatcctacaattgaaaagaccgcaatctgcttaaatcctggaaatggggtaaaactcaaaaagatgtatgcaactaatgtggtcattaaacccataaacaaacttggtaatagcggttttaaaatttgaaaaccgccaagctttctgtgctgcgattgcatcgccataaaataaaatgaaaaatcaacacaaacaccaatcagacttgcaccgaacactaatgtcatcaggtgaatttcaccaaacacccaatgtgtgactgcaaacgccacaaagcttccagtcgaaactgcaataaactcggtcgccaaaggtcgcaatgagcgaaagccgaaccaaaccagaaaaattaagcccagtgtcgagccaacaccaatggttgagatttcctgtttggccgattgcgtaccaaaatttgaaaataaaatagttccagtccaatgagattttaatcccattgccgctagtttttgcttagtttgttcaatccaagtagaggtctgttcttggtaatcaatattgtatggactttgcgtcaactgtaatacgaaaagccgagaaatgccttgttcatgatgaattgtggcaaagccctgctccatttcaatatcttgttgcgacggggttgccaactgcatggcataacgagggaacaacagtaacgggtcttgcttaagtgactcagcagtgacaggcatgcctggactcatcatctgcatcagactttgttcagtcagcgcagcatagtcctttttttgcaataaggcttgatcttgagtactcaacaaccctgctctatgttgatacaactgttttgcaaattgatcaaaatcaagctgtggtttgagtggctgccatagtgcactttgcttagcttgagcttttaaaaaatgcgtcgcttgttgtatcgcagcctcatctttggcatctaccaccacaaatactttattgttgagttgctcattcatgtactgctgagtacgtgcaagttctgggtcctgctgaactttaggcaataacgcaaaaatattagtttgaatatgaatatctttattcagccacgtcacgccaagccccacagcaaccaatagcagagcaattaaccaaagcgcggtgaacttattttgccagttggaaaatcgcatgctcagcagccgttagagtcgtcggttgagaagtctggtgactaaagcgaatggtcgttaaattattcgctttctcggtaatcacgatttggttaacgtactgttgaccttgagcatcaacacgcacaaataactttttaaacaagctacttttcggagttaagctcatgctccaacccgctggactataattcgcacttaccacattaaaattctttgccaaagcctgttcattaccagacatgagctgtaagaataaagtcgcgaccgaactatatggcgattgatcaacttgtatctggctaaatgtacgctgagttttctgtaccaatttggttggggtaacaatcaaatctgcttgcacaggtcgcttgatttgccacgctacaccataagattttgagaacaacaaagagccgttcgatacaaaagttttattcaacgatggcaattttttttgctgttcgaaatcagcacgaaccgtaggagactgtgataattgctgaaaaatttgaatgatctgtgttggcgctgcatagaccgcacttaaactgctcatccaaacagcagcacctaaacctaaagttttgatgaatttagacatcacgcattcctcttcggttgaaactcagaccatgcattcaagcgatcaaacaaaacctgtggcgattgaaaacacatttcacgagcttcaatattcaccgccacctgtgtggtataacccttggttaaacgtttccctgactcagcatcaaaaatcaaataatcaattttcaaacggttttcccattcttttaaaatggcccgaacccgaatcttttgttcaaactcaataccgtatgcatagcgaacatggctttcaatcacaggccatgcatagcctgattctttcatctgcatatagttgtaatgaaattgatcgagcaatttacagcgcgcaatctcaaaatattttaaatagtgtccatgccaaaccacattcatggtatcgacatcatgaaatggaatttcaatgattacatctgcatgcattggctcaccttatcccataaattctggttgattaaacaattcaagttggtctaaacgattaacaatctgttgtaattcggtttgtaatggtcggtcttcttcgacaaatgcaaagctttgtaaggtccattgcataaacgtttgcaatgttggacttaactgtgtggttaaaccttttaaatgaatcgcctgcacactcgcgcagcaaagtgctgcaatgacttgctgtgtcagggtaatcacacggctcgcatcacgcgcagcaatggtacccatgctgactttgtcttggttatggcattcggttgaacgtgaaaaaattgaagctgccaaagtatttttcaaggcttcagccgtccacgccgacaccccaatttgtaccgctttaaaaccatgattcagtggtaaacgttcagctgtcgcacctgttaaattacgtggcaaaccatgattcattttgtggtcaaccaactgtgcaatttgtctgtccatcaagtcagcaatattagcgatcataattttcaagctatccattgcttgtgcaatgtgcccaccgtaaaaatgaccgccatgcaatacacgcatccctacaggatcaatcaatggattgtcattacttgagttcaactcattttcaatgaactgacgtaaccatacttttgagtcttcaaacacaccaataatatgcggtgcacaacgaagcgaataacggtcttgcaaacgtgggctttgatgtgctgtttgtacttcactattcagccagtcacgtaattgcttggcaatgtgttgctgtcccggatggggcttctgtgcaaacaggacttcatcaaaatgactaggattaccttccaaagccaatacatttagagcagtaattaaagtacttgcaagtgcaatttgctctgcttttttatagtttagacaagcaattgccgtcatcaccgctgtgccgttcatgagcgccaaaccttctttaggtctaagcgttaaaggcagcatatttttttcagcatacacctgagcaactggaacaatttgtccatcgatatagacatcacgctcaccaactaaagttcccgcaatataggacaacggcgttaaatccccacttgccccgactgaaccttcagatggaataactggaattacattttcattcagcaaccaaactaagcgttccagcaaagcgatcgacacgcctgaatagccgcgagctaacgaacataaacgcgtcacaactactgcacgtgcagtgatgacatctaaattttcacctaaaccacaaccatgaaaacgtgaaagatgcagcggtaattcattaacctgatgcaatggcacttcaactaaacatgagtcgccataacccgtagtcacaccgtagataaccccttcctcttcaaggagctgatcgagaaaatcagcgcctttttgaatcagttcacgccattcagacgtttctggtaaagcaacctgacattcgcctctggctacagaaacgacatcttcaatactcagtggctgttcacctacggttaacacacgcatgttatttcgtccaaaaattataaaaattaaaccattgataaggggcacgcagacaatgctgttctagtacggcaacgtatgttttagtgatggtttgcatactttcaatacggttagcacgaggtaaatttatctgctcggcaattgaatgaatatgcacttgaaactgctgctgcacccgatagcaaaacacagcaataacaggcactttgagtaaatttgctaaaatccatgcaccttgtgggaaagctgctgactcccctaaaaaatcaacatgctgtacacgatctgactgcacaggcactcggtctgccgccacaatgacccactcaccttgctgcattttgtcttgcaacagcatggcagtttcaatacctagctcatcaactgataaaaggcaaacatctgccttatcatttatttttttcaaaaactcattaaattttgtcgcgtgcttttggtaaaccagcacattaattttctgcggatgctctgacttaatagctcgaagcaactcaatattgccaaagtgagagacaataatcagagcacctttttgataatgctgagagaagttttcatgtccaaaaacttgcagttcctgttcgggaatattacctagccagccctcaatcttatctaaaatacattcgccaaattgcatgaaatgcgcatagctatttgaccaatttggttggtagttaaacggcgacttcgatccagcaaaatgatgcagtttttgtaaataaagtaaggaagcctgtcttgctgtggtagcaaataaccagtaccacataatgacgaagtacatcaccaacttgcataaccaacgtccaccaaaacggtaaaaccataacatcagcatgagaggtagcatccctcctcgctctttaatgtcattccattttggtgaagctgaatctgtcatagtcaaccttgcagcttttgttttaatagcttcggcaagcgaatcagcatgcccataaacaaagttgcatgcgctttgcttagccctaagttatctcgccaagcatgaaaatgagaaattccttgctctggataaaccacaggtgttggtacattaataaaaggcgtattttcccattttaaacgtactaaaatttcactatcaaaacccatacgtggctgaaatttagcactatttaaaacctttatcgtgctctcaagcggatacacgcgaaacccgcacatgctgtctttaatttcaaaagacaaactgtttaaccagacccaaaaatgggtaatgtaacggccatataagcgctttttaggaatagaggcatcaaaatatggctgaccaattaccattgcatcgggatgctggtgagactgctcaataaattttggaatgtcatcccagcagtgttgaccatccgaatcgagttgtaatgcatggcttaaaccaagctcataggctgcacgtaaaccagtcattacggcttgccccttacccttattcacctcatgttcaattaagtgaatttgagaatattgctctgccaatgcttttaaaatttggctacaagcatcatcactgccatcattgaccaacacaatcggtagatgaaaactgtccagataagaaatcaaatctgctaaataatgtggatgattataaaccggaacaacaaagccgtaattggactgcatttttaatcctctacttctgtttgcaaggcaaataatagtcgccctgaagccagaatatgttctgaatcacgtagttcaaaactcactttatgctcttttcgagcaagcttgagttgtaccacggcatacggacgaatcaggttttgaaattttaactgctcatatccctgacaccagctcaaatcagaccaaattgatttagcaaagtgttgtaaaaagcctatttgcccaaccccaggataaatgggttgtgttgggaaatgccctttaaaacaagccaactcaggtggaaattctaattcccaaatgtgatcatctgaattttgagactgtgacagcaccacgggttgcaacataggcttaaatagagttttcaaatagtttttattgagtttggactgagtattttgtggtaactgacttaagaaccgccactgacgtggaatcgcgatcgtttccaagccgtctttcaactgttgttttaaatggctgacaaaagccgacttaccctgttgctgtaactgttcacgagcttgctctgttagaacaacaatacaacccaacatttggcgttgctcatgttcaaataccaatacatggcattgctttacgacatctaaagcttgaatgctttgctcgatcgcatctaggcttaaacgcttttcttcaagttttacaattcgatctgtacgccccagcagcttaaagatctgacatgttgcatctgtccatgccgcaccgtcacctgtggtaatccagtcattctcataggcatgattactcttgaccataagctgttggtcttcaatacgaatagccacattactaaatgcagtccaagcatcttcatctttagcgcgatgggcaataccaccagtttccgaacttcccaaaacttcaataatcggacgatttagtaaaggacgaacatcactttctagcttgcccccagaactaaagaccatctggcagtgttgtaaaacaacatcggttgtccagcgttttaataaagcaggacttgagatcaaataattgcttaaccccattgtttctaattgtttttgggcttgtaccacatcttcagggaatgccatttgaggattataaaaacttcgacctctagcaagtggtagtagtaatttaaacagtaatccataaatatgttgatgactaactgttgcaatcgcagttgcatgttcatcaaagctaaaactctgactcaacccttggacttcgttaagtaattgtctaagtgttcttggaatttttttaggttccccagttgaacccgaagtataaaaatagagttgagcctgctctaaaaaagtatcatctaaggttaaagataaaggtacaacttctccaatttcttgacgctttaaaaaatagatctgctgtgctgaaaaatcctgttctaattcacgcactcgattgggtggcaaaagtatttgctttttcgctaacaaggcagcaaagaataaaacgagaaattcataactatctgcttcccataaagcccaagttagattttccatttgagcaattgcagcagcttgtaatgccacatcttgccaaaattgattaaaactggtcgagtttagagtaccgtctatacaaagtggctgagctgaatcgatgaatttctgaaaatggcaatacatagtttttaattaatgatttgaagaatgtaaacgctgatgtcgcttacgcaaaataaattcaccaaggaacaaaatgcccatcagcacataagaaataaagccattataaatgacccaaacctgagttgaggtaaaaagcacagtgcttaaagcaatcaatgcattacaaaaaaagaaaacacaccaaactttggtgacctgtctggtccactgtacaccggaagcaggtaaatcaggttcaacgagtcgggcaaagcgctcaatcatagacggcggcttaatgagcgtcagcgcaaaaataattaatgcacctaaactcatacccactggatacagctttagccaagcatggtcatgtgacaacaaactcaggctaccacaaacgatggcaaaacccgttaatggccataataacgagttgcctttgctaaaaagtctgatcacacccaacccgatgagtaaagcactcacccagacaaattggccgtgactcaaactccagcccacaataaagggatacagcacaaaaagtgccgtcattatccctttaagaataaacttcattcagcagtcatgttctgaataaccgtcaccacatcaagtacggttctcacatttttaaagtcttcaggttttacttgcttacctgttaactctttaatttttacaactaaatcaaccgcatcaatactgtctacatcaaggtctgaataaaggttcgaatcgagttgaacagtctctggttcaatttcaaacaaatcttccatccattcgcggagtttagttaatacttgctcttgagataacatcatcatgctccttatgacttctgttgtgcttcaactaaagcaaccaagctctggattgacttaaaatgctgtttagtttcatccgattctgcatttaaatgaatgttgtaacgctttttcaaagccagtcccaactcaagtgcatcaatcgagtctaatcctaaaccttctccaaataatggagcttctgtatcaatatcggcaatagtaatatcttctagtgctagaacatcaataatcatttgctttagttcatcagcaagattgctcatttcaagataactcttcatcaaaaattttataaaaactacgacttaactgacgaacttgtttaggtcctactgttaaatcatctaacagatctgatacttgcacagcatctaataccttgacctcaatatgaaatggttgagatggtacgtggtaccatttttcattcttggttaaagttgatggtgtacaagtaataattactgggcgaattggtacatttgcacgaatggcaatattggctgcgcctcgctgaaactcgtttaaggtcatccctttttcagtgcgcgttccttccggaaaaattaaaagagaggccgcattattttcttttagacgctttacacagtcttcaacaaactgctgagaacctgcatttaaaatatagcctgcgctttgtacgggtcctttggtaaatgggttcgaccaaagagactgcttcacgacacaattagcctgctgcatcataccaattagtactacaacatcaatcaaagtcggatgattggcaatcaccagctcttggcgactattttgtagtttttccagcccctctaccgaataagtcatgatgccgagtttgaccatcatgtcagtaaagcctttgaaactatgtttaatcacattttgcgcacgttgctgtcgcttttgcggatcagaagtggttgcattgagtacaggtgcaatcactgaggcaatggctataccacctagcccaaaactggcaaagctaaagccagtagcagccacacgccagcaataattacttttttgcttgagatttttaagatttagcatttgttccacccaaatgcagatgttaactggtcagcatcctgccaaaaatgagcaaaagcaggagcatctgcttcatctgtatgcgtccacgcagtaatttgtaaattaggttgctctagagtaacgacagcagccatcgcataggcaggaaaattgatcgcctcagcataaatattaggtaatggctcatcataggcgacgactaagacccgcttaatctcaggcattgactttaaaagtgcataagcctcaatcaaaccttcagtccatgaacagcttaagcttgtagagggagtatcatcctgacataaaatcgagtagaggcccgaaattgcattatgaacagacgttgaaaattgtgttggcgatggagtttgatcatttaaaacgtcttgcaagatatttaacgtttttgcctcatcaccatattttgatacccaaacaatatagtctgcacttcttccatctaaactactaattgcagtatttaatgctaatttagctaaaggtgacagacgtctcctttgcatggctggaatacactcaagtgccgcataagaaggttgggcatgtgtaagcgttaaatgagcaagatgtagtgttaccatgctaaaaaagaaccttaagcagcattattctttcggaatatagattattttataaaaaaacggattatagcattcgttataaaatttacaaaaaattacgtttatcactcacactttttcataaatcttttttcaccttaattctttgtaaaaaaaagcccaaagaagactttggactttttcaattaaaaacagattaacgtttaaatttcttttctgcttttttgaatttctgaatataacgacgacgacgtgcagctgtacgttcatcgacctgactcttacgaccttcaaacgggttttcagaagtcttaaattcaattttaactggtgtaccttcaagcttataaaccttacggaacacattctctaaataacggcggtaatctgcaggagtcttatccaccttgttaccgtgaatcacgatagtcggtggattttgtccacccatgtgcgcataacgcattttaatacgacgaccttgaactgtcggcggctgatgctgatcagttgcatcattcaaaatttgtgtcaatttcgcaggagatacctttaagtttgcagactcataagcacggtgaattgatggatataactcacccaccccagtaccatgtagagcagaaataaggtgaattcgagcccaaggaataaagtcaaaacggcgctcaacatcaagcttacactgcttgcggtcgtattcactcatgttgtcccatttattgatcgcaatgaccatggcacgcccagcttccagcgcatagccaattaaatgtaagtcttgctcaacaataccttcacgggcgtcaactacaaccaccaccacatgtgcgtctttcatcgcttgtaaagtcttcacaattgagaatttctcaatcatttcatcaactttacctttacggcgtacacctgctgtatcaattaaagtgtatttacgaccttcacgctcgaacggaatataaatagagtcacgagttgtacccggttggtcaaacgctaccacacggtcttcaccaagtaagcggtttactaacgttgatttacccacgttcggacgaccaataattgctagacgcaatccggtatctttatcatgctcttcaggattttcatcttctggaatatcttgaagtacatcctcaagcatttgttgtacgccacggccatggctcgctgcaacttgtaatggttcacccataccaagcttgtagaactcaaccaaagcagcttcagcatgaacaccatcaaccttattggcaacaagataaattttcttgcctaaagtacgtaattcacgggcaatttgctcatcggaagctaacaatccggcacgcgcatcaactacaaaaataataatatctgcttcattgatggctgttttcgactgctcggccatgtagttatcgataccgccttcactttcaccaataccgccagtatcaacaacaatgaaagacttattttgataagtcgcatcaccatatttacggtcacgagtcaaacccgcgaagtcggctacaagtgcatcacgactcttggtaatctggttaaataacgttgattttccgacattcggacgaccaatgagcgcaataacgggtttcatacaataaccttaattcaagaccagccatatctcatggcatgagcattagaaacagtacaggagatatattttaaggtcagatatgaccataataaaagacggggctttgaactgatttaattcaaacaccccgatatttttaacagcgtaatttgttaagcggctattttagcacaagcgaacaaaattaacgattctgccaaatacttaaatcgccttttcgggtcgaaacatagagctgattctcaatcacacgtaatgtattgacctcaccacttgttttagaacgaccaatcaacttacctgttgtcgggtcgattaagtgtaaaacaccatccaaatcaccaacaataaggtccgatcccaacacgacaggattacttaaatgacgatttaagagactatcattttgccaaagctgttcgcctgttgttaagtcataagcagtaagcttgccgtcagttgacgaaacaaacactttattatcataaacttctggacgcttggtgctacttgaatcttcactccaaaccacacgttgagaagcaagatcagtaacagttacttgcccttggaaactagtcgttaccatgagttgacccgcaacaaccggatcaccatcaatgtcaattaaacgctgaatatctgaacgcccttcacttactgcaacacggcgttggaagcgcggaataccactaatcgtatcaattgcataaacatatgcatttgcagaagcaattaaaaccgtgcgagggtcaagactcactggcgatggttgaccacgtaaactgaactgaacatttggcaatttatatgcccaaacttgttgtcctgatgatacatcatgtgcaaatacagtaccgtcatttgcaattgtaatcacgcggccagactgaactaaagaaggacttaataaagcaccggataattgtgcagtccatttttgttcacccgttgcctgatctaaagcaaataactgacctttactgttaccaacaacaacaataccttcagctgcttcaacaccagagcttaagcccaatttactaacttttttctcccaaagacgttgtttaccacggtatgcagcaacttcacctttaggatcaagggtaaaaacaacaccttcgctagcatcaagttgtaaacgtaatggatctgccttattcgtagaagaaacactgcgtgaaaacacgggcaccaaactcttatttgactcagtcaatttcggtagtggatttggttttgcttcttttactttgttgctagaacatccgaccaatacagccgatgcgattgcaattgccaaaggcagtttgaatttctgattcattaagactcttccacctgtgtttccaaaattgggcgctcaatctgtggatcttcaactaaaacgccaacactttcgagtttaatttgtaaaatttgtcgctcttgtttacgttccagtaacgaatcccatgcagcttgatatgcttttttagcagaatcaatatctttcttagcaacaaagatatcaccacgtaactcttctactgttgctttaaatgccggatcgacatcaccagacaaggtttttagagcttcatcatatttgttttgcgccaattgtgcatctgctaaacgcaattttacaacctgaatcagtccttcatcttttacttttgaattctcaacttttttcaaagctttttcagcagcagcataatcttgtttttcatatgcaagttttgccaatacaaattgagtttgtatcgcctgaactgaatcaatatcgtcttttacaatcttatctgccgaagctgttattgaagctaaagcatttggattatcggctgttgcattcgcctcatccattaactgctgtacttttgcagtttctgtctgactcgttgcaaggtttcttttttgccaatattcccacccgaaaaaggcaatcaatgcaatgagaatcccgctaatcatggcagaaccatattttttggcgaacgactttaagctgtcgaattgttcttcatcacttaagctcatgtgattgtccttttccagatgtttcagtttattttgtaaatttttcaattaagaatggtacaagttcagccaatgcaacttgtgattgctcagctgttgccaactcttttacagcaagctgctgtgcttcccactcacgttcacccaaaattatggcgtaaacagccccagcctgatcagcttttttcatctgactcttcatgctgccttgtgaaccagttttaatgcggatgttactattcgcagcttctaattggtcacgtaattgttctgccaaaactaatgctttagattgataagcaggctctgcaaccaagaaagcttcacagtcacgtacaatttcagcttgttcgacttgctcaattagaagcaataaacgctccattcccatgccaaaaccaacggcaggtacagactgatctgcttttccttttaactggccaaccagaccatcataacgtccacctccgcacactgtaccttgcgaaccaagtgcagttgttgtccattcaaaaacagttttattgtaataatctagaccacgtaccaatttttgattaattacaaatttaatgcctgcagcagtcaaataatcttgtaattgttggaagtggcttaaactgtcttcttttaagaagtcatataacttcggcgcattttccagaattttctgagtcgattcaattttagaatctaaaatacgtaatgggtttgttgttaaacggcgctgtgaatcttcatccaaagcatctttatgttcattcaagaacgcaaccaaagcattacgatattccgtacgctcttctttttcacctaaagtattcagctcaagttgaaccatatgtgcaacgcccatacgcttccataaccgagctgtcattaagataacttcagcttcaatatcaggagtcgctacaccaaaagtttccacgccaaactggtggaattggcggtaacggcctttttgtggtttttcataacggaacataggccccatataccacacacgtggcgtagcaccacgcaacaaattatgttcaaccaacgcacggacacaacccgctgttccttccggacgtaaagtcagtgactcaggtgggtttcctttatcgaagaatgtgtacatttctttttctacgatatcagttgcatcaccaatagcacgtttaaacagtcccgtttgttcaacgatcggcaaacgaatttgttggtaaccataagcatccattaaagatgctaaatgctgctcgagacgtctccacgctgctgtttgcgttggtaaaacgtcattaaaacctttgattgcgacaattgaactcatgatgaactacgaataatttctttagatttagcttcttcaagctcttgaacacgttgacgaaccatagtttcgatttcatcaaccaattgattggtatcaattaaatggcttttctcaccattacgataaaccaatgaacgaggcgcagccccaacgaccccgatatctgcttcttttgcttcacctgggccatttaccttacagccaataaccgaaacgtccattggtgtacggatatcttctaaacgctcttctaaagcctgcatcacctgaatcacgttaaattcttggcgagaacaacttggacaagcaataaagttgataccgttagaacgtaggccaagcgattttaagatatcaaaaccgatcttgatttcatcttcaggttcagcagcaagcgaaatacgcatcgtatcgccaatgccttccattaataacccaccaagagcaatcgctgatttcacagtacctgtacggtaaataccagcctcggttacacccaagtgcaatggattatcaatttgttgtgaaagcaaacgataagcatccatggttaaaaacacattcgatgcttttacgctgactttaaactcatggaagtcaagacggtctaaaatatcaatatgacgtaaagctgactcaagaagtgcctgccctgtaggctcgccatattttttctgtaaatctttttctagagaacccgcattgacgccaatacgcatagaaataccgtgatgacgtgccgcagccacaacttcacgaactttctggtctgaaccgatattgcccgggttaatacgcaagcagtccgcaccataatccgcaactgccaaagcaattctatggtcaaaatggatatcagcaactaatggaactgaaacacgcttacggattgcaccaaaggcttcagcagcttccatagagggcactgaaacacgcataatatctgcacctgcatcaacacaacgctcaatctgagccacagttgcgtcaacatcgcaagtttcggtatttgtcatactttgcacactaataggtgcatcgccaccgacatagaccgaaccaacacggattttacgtgttggtcgacgtttaattgggttctctatcattgtatcgctcaactcatggtattagcgggataaacggaattcagctttaccgtttaccgtatatggagacaatgaaatctgttcttggtttagacttaatgacacagccgttgcatcatcaagacgaatctggaatggagactcaccatttaaggttaaagtcgatgcctgacgacccgtcgctaaaaccttccctgttgcatctacaatatgaacagaagttggacggttaaagtttaacaccaattggtcacccgctgttgcagaggtgttccctttcataggtaaaacttcaacattagactgatttgcttttggcagctcagcatctcctttgtttgaggtccatttttggacacccatcacaattaatgacacgacagcaataatcaaaattgcaagcagtgcgcgctttaaccattttttgttacgatcactattagaacccggtaatttacccatgattttaattggtgagttgtttaaagcatgatttggcaaaagcccagtatcgtttgcataaatctcatcaaaacgctggataattgcagttgcatcagtatttaaatacttcgcataagaacgataatagcctttgataaaagtcgcttctggcaaagatttatagtcgtcttgctctaacgcattgagcgttttcagcggcatatttaaatctgaagatacttgctctaattcttttttctgagaaacacgaatttgacgtaaatactcaccaggacgttgaatatttcctaaagcagaagtcggtaagcttgagccagttggctgctgtgaattaggatttatttccatacggcctcagtactatactgtaattgcaaataacgttgatattctggactttccgggaataaagcacgtaactggtttactaaaacttgcattcccattttatccgcattggctcgagccactcttaaaccaatccaaagtgcgcgtgcaccctgatttttctgccccactgtacgaacatattgttcatacatttgtgtagcagccggaatctgctgctgcaaataaaaaatttctgctaactctaacattgaaatgtaagagtcgcggttagcaagaagtgcttgtttgaatgttttttcagcactcgcaatatcgcctagttttaaataaattcgccccagattttctaaggcctggtaacgttgatcatagcctaatgttgcaccagcaatacgaaattgctcaatagcatcattataacgctccatttggtacaaatacgtaccataattattacgtgcctgagcattgtctggttcagatgaaattgcacgcttaaagtaatgttctgctttttctaaattgggtttactgccttcttgttgcaataaaatacccatcatcatatttgccgttgcatcacgactatcgacacttaacgcttggtcaagagaacgctttgcagaatccaagtcaccagaacgaatgtattcggcagcaagctgcgtacgcacttttactgctttttccgggtcctttttaaccgtttgcgaagtctgacaaccacttgtcaaaagtgcaacagcaacccccatacataacatgatcttcaacttcggagtactcaaagtctgccctcaatattatccttgtgtacgtaaaatctcttgtcgttgagccactttcttttgccactgctcagcacgacgcgtacggtcagcaacttggccgaccaattgtccacatgcggcatcaatatcatcgccacgtgtttgacgaatcgtacacacaaatcctgcatcagacaaagttttttggaaagagatgatacgatttcgacttgagcgtccatatggcgcatgagggaacggattaaatggaatcaagttaattttacttggtaagtttttaagtaatttaagcaactgctgtgcatgttcaggttggtcgttcacaccttctaacatgacatattcaatggtcacatgtttacgcgcgctttcattaccatcttttgcaatataacgctgacatgccgcaatcaactgagccaatggatattttttattaataggcacaagttcattgcgcaattcatcatttggcgcatgtagggaaattgctaaagcaacatcaatatcttttgcaagttgatcaatttttggcacaacacctgacgttgacaaagtcacacgtcgttttgacataccataagcaaagtcatcgagcataatgtgcattgagcttaatacggcatcgtagttgagcaatggctcacccatacccatcatcacgacattggtcactgaacgctcgcgctcagcaacaggcacttcttccatataggaatagtttgccatccaaagttgcccaataatttcatctggggttaaatcacgctgaaaaccttgcttacctgttgaacaaaatgagcagtccaatgcacaacctacttgtgaagaaatacacaaagttttgcgtgaacctgttttatcttcggcaggaattaatacagtttctactaaagagccagaaccttcacctacgcgaaacacccatttacgtgttccgtcttttgaataatgacggtgtaccacttcaggggctttaatttcacaaatttgttcaagctttgcacgtaatttacctgaaatattggtcatttcagcaaaatcagtaacaaagtattgatgaatccatttcataacctgaccggcacgaaactttttctcaccaatatcttcaaagaatttttctaattcagcacgtgacatgccgagtaaattcactttttcggcagcaggcgatgctggcgtggacgaagattgctgctgtccatcaagattttcagatgaaacgaccactgcagaactcatgtgtatttacctaaaccatgtcaaaaaaagaatatattgttcaagaatcaaacaatatgctcttgagagaataaaaaaaccagataagtagtataccacttatctggtttgaatgctttcgattaacgagtgcgtgggcagatctcgttgtcagcaaagaagtaagcaatttcacgctctgcagaagcaactgagtcagaaccgtgagcagcattttcatcgatgcttacagcgaaatcagcacggatagtaccaggagccgcttctttagggtttgtagcacctaagatttcacggtgagcaagaactgcgttttcaccttcaagaacagatacaacaactggaccagaagtcatgaatgcaactaagtcaccaaagaaaccgcgttctttgtgctctgcatagaaaccttcagcatcagcttgagaaaggtgtttcattttagtcgcaacaatttttaaacccgctttttcgaaacgagcaaaaatttcaccgatgtggtttttagacacagcatctggctttacgatagacaaagtacgttcaattgccatgagtggctcctttattttaagatttaaactttaaaaaatttgccgcattataccgatgtcataggcaataatcagctttgaatgtgtaaaagttgcgattttttctactgtttttagcgaacttcatccaaccaagccatctggatggcttctagcaatccttcggttgatttatttgggtcatcactgaagtctggtaacgcacaaacccatgcatgtaaatcggtaaaacgaatccattgcggatcaacttctggatgtgcttctgacaattcaatggcaatatcaatcgtatctgtccaacgtaagcccatagcggctcctatctgtttaatctgctaaatcaagaactgtgtactttagcaaatccacaaacctaatcgatagcttaagctgataaaaattactgttcgttataaagcaatgctcaataatggcgcgacaaaaataatcagacttgctactgctgcaccaataagtgcgcccacaatcacatcactcggatagtgaagtccaagtaccatacgagacaatgccacaagcaccatgaacggcaacatcgctgcaagcaacacaggttggatataccccaacacaattgtcaccatgacagcatgtaacgtatgacctgatggaaaactaaagtgatcgagtggtctttcaccgagaacaatcacctgatgtacttggtaaggacgtggacgcgtggttttatgttttaagaatttataaattgctgttccaaccgaaccaccaagtagcaaatagataatttgcaagctataggtaatgccctgcattccccatacaatcgccaacatgaggtaccaaaaaggtccgtcaccagcacggctaataattttgaagaataatgccacacgctgtgaatgagagaaattattgagatataagcagcctcgtaaatcgagatcgagtatttttatttttgcattcttaaatttcatggttgttctcctattttaggatacttaggtgaagtccgccgagggttccttcactacctgataaaatgcctgttctaattgctgtaccggaagttgccaaccgctttgctgtactttatgacaggcttgtatgcccatttctctaagttgttgtattgaaggaagctgataaatttgttgtataaaatggttcttatgcccaagtgggcttaaccaaccgtttacgccatgtattaaatactggtgtgcacatgcataatcatacgcgataactggcaaaccgctcgccattgcttccaaaactacgttaccaaacgtttcaacttggcttgcaaatacaaagacatcggcacttgcatatgcgactgccaaatcgtgcccgcgcaaactacccgtaaaaataacatttttcgcctcaggtagtgcttttaatcgagcaagatccgggccatctcccaccacaaccagtttagttttctgttgctgaatgttttgcatagctgcataactctcaacgatcagctggacttctttttccggtgataaacgacctacatacaacatgacacgtgtattggaatcaacgccccattgctggcgtaagctttctgagcgatgttttggtgaaaaacgagtagtatccactcctcgcccaacaacgactagagggcatgtaattccaaaaccgcgtaaagcctcttccgtgtccttgctcggaacacaggtcacctgagtattgttatggaaccagcaaaggtatttttgaatcggcttcaccaaaaaggccaaatcgaagaacctgctaaaatcttgaaacggcgaatgaaagccactagagaccggaatatttttggcttttgcggcttgcatggctgttaaacctaacggtccttcggtcacaatatgtacgacatctggcacaaatttttcaaaagcttttgaaacttttaaatattggggccagccaaattgcaaagttggatattttggaatcgcttgtgacatcaccagacattcttgttctggcaaaaaatcatgacatttggctttttgctcaggtcgaacaagtagaattttatgcccttgtttctgtaaaccttggcatagctgcaacaaagagagtgctacaccattaatttcaggcggccatgtttctgtcacaatcgcaatttttaaacgaggacgaaccaactcgtgaagttggtgcaattcctgagtattagacaaatgctgtttttgtttaaaatagaattggaagctttcaggaagttgctgttgttttaatagtgctgtcgcgtatgagccttgcatagcgccatccatcagtatatttattttcatgcttaaagattaagcagctttcttgacactttgatgataaatgcatgacagtttactgacataaaaattcaaaaagcacgccgagaatagcgtgctttttcataaagcagacaagagaacttaacggttctgcaatttcgcataatccatcaatacattcgcagcttcatttacgaacgtttcttcttctggcaacgcaggacgttgattagctttcattttggcacgagattcagctagagcatctaaagaagcctgatagctttcccagttagggaaaggtttttgacctgttgctatacgacgttcattttcagcatctaaagtttgcttttctaaactcaaaagctctgcacggcgcttatcaatatcaagcacaacttgtttctggtcactcgtaaccttcgcaattgccgtacgtttatttaaatacttaaactgtggatcaacagcaacgcgttgttccgaaagttgagacagcttcgctacatatggctgcactgaaccttcacgcttaaatggtgcagtcggaatcgtatcccacttcaacgcatttttcgatttacgctcaccaaactcttcgttatagatatcaacaagcttaatatctggcactacacctttgttttgtgtactaccaccagttacacggtagaatttacgctgagttaaggttgcttgaccatatgccaaagtatcgagttggacctgagctgtacctttacctgtggttgtactaccaatgataatgccacgctcataatcttgaattgcagcagagtaaatttcacttgcagatgctgatgccaagttcaccaatacagcgagtggacctgtatagatttgctgaccaccatcattgtcttcaaacacacttacgttgccattgccatcacgaatttgcacaactggacctgacttaatcacttgtccgagcatacgtgcaacttcttctaatgaaccacctgggtcattacgcaagtcaataataataccttctacttttttagcttttaatgcctcaaacgcatttgcagtatcttcagaaactgagcgatattgctgaccagcacgacgtgaacgatagtcaaaatagaacgatggaatttcaatcacacctaatagatgctttttaccatcacgtgtcacttcaactgtacgtgaacgaacaccggcatcctcttcttgaatgacatcacgtaccaaagtcacattgcgtgcctgactcattgatgcaccagcaccaagaagcttcaacgttacttttgtgccacgcttaccacgaatcaacccaacaatttccgaactcgaccagccgacaacatcgaccattttgccgccctcttgagcgacaccaacgattcggtctcctgatttcacttgaccagacttacttgcaggaccaccttctacaatagtttcaatcttggtgtaatcttcattaccacgttctgggcgaatcgataccccaataccttcaagctgtaaggttgtttggcgattgagttctatcgcatcaattggcggataatagttactgtgtggatcataagttgccaacattgcatttaatgttttatccaacacatcgtcgcttttcacacgactaattctttcaagctgacgcgtataacgcttagtcaaagtctgagctggcgttaaatcttctgggcctgttaaatcttgaccatcagcaagtgaagggttttcttttaacgccttttgtttcgcctgctcttcttcacggctaattgttaaattgattaactgagaaaccagcattttacgccagtgattttgctgctcagctgacgttttaaaatacggtgctttttcgcgatctacttcaataaaagtatttggctgttttaagttttgtggtttcttcaactcagcaagcatgaactcataaaactgttttaagcgctcacgatattgctggtgaatagcaaatggcccagttaaattccccgcttttaatgaagcaccaaaatttgaaccatagagctttttatagttttgaacttcagcgtctaaaaataatgagtggtccggatcaagactgtctaagtacatatcaagaatacggttagatgtgttcgcatccagacgcatatttaaataatgttggcggtctactaaagttgccagttgacgagccaccaaggcttgctcttgcgttggctggatcgattgagaaacagcagcagtattggttgctgctcttgcttcgttcatcgtatgagagaagaataaaccgccagtcgcgattgctactgcacaagctatagtttgaagtttcataaattcttaatacttccttgggtgttcgtatcttacacgctctgttttcgatatgaactaagcagattcaacatcttaaccaactaaattgtttataccgtgtagttttatcatattctgtactgacaaaatgtagcaaatcattgcaaaattcgcttattgtttttcaatcaaaattcaaatggaaccaatatgattggcgcgttgatgctggacatagccggcacagaacttactcaagaagatattgaactattacaagctccgcaagtcggtggcatgattttatttgcacgaaatattgaatcaccacaacaagtccgtgctttaaccgaccatatgcgccaagttcgcccagatattttgattgctgtcgaccaagaaggtggtcgcgttcaacgtctaaaatctggctttacattattgccagccatgggccgttttggcgagctctatatcactcaacctcaaaaagcacttgaattagctgaacagtgcggctggttaatggcaactgaagttttggctgtggggatcgattttagttttgcgccagttttagatctgaatgcaattagcgatgtaattggtgaccgtggcttctctaaaaatatcgaagatatcgctccacttgctggtgcatttatgcgcggtatgaaaaaagccggcatggcaaataccggtaagcacttccctggtcacggttcggtaaaagccgattcacatgtcgcagccgcaatcgatagccgtagctatgacgaaatttataaccatgacatgcaaagctttatcaagcttatgcctgagctagatgcgctcatgcctgcacatgtaatttacgatcaggttgacccaaatccggcaggtttctcacctttctggattcaagaagtccttcgtaatcgcttgaagtttaatggcgtacttttctccgatgacttaagcatgcaagctgcttgtgtcgctgggggtgcagatgcgcgtattcaagcggctctggcagcaggctgtgatatggggttagtgtgtaatgatcgtagtgcagcatgtacagcactcgatggtattacaaacttagagctaccaaatcaagagcgtttagaacgtatgcgtggtcgaattccacaaatccaagttggtgaaactttatcgcttggaaatgactggcaagctgtcaaaacagccattgaagagtttaagaattcactctaaattctagtgcaagaccatatttgactgataattaaaaaattgtcagtcaaaccacacaaaaacaataaatcgagttcaggacgaatgacacaacacctttcaaaacaccgccacatttcttttacagctcactatacaggctatatctggtatcaaatggggatctcacatgaagcacttgccaccagtaaaggcaaatcactggcatatttaattcacccattagagtcttgggcagagaaatatgtgggaggcagcatgcgcacgacgcttaaacagcgccataccatgcttgatcatgatttagagaagttaattcaagaaaaccctgatttacaggtgcttgaaattgcttgtggtttatcacctcgtggctggtggtttaggcagcattatccttccattagctatcgagagcttgatttgcccgatatggctcatacaaagcaaaatgcattacaacaaattgaaaaaaatgcacctgaagttttatcagtcgatttatttaccgaagcctttgctcaagcattcgaagtgtttgactctaatcgcccactagttgtaatcagtgaaggtttaattaactattttgataaagacttattaaagcaactgatccaatccattgcccactatggtgcttcctttaaaaagcttcattatttaaccgacctgtatcctgaacccgttaaaaacaaacttgcaagtattatctggaacagtagtaaattacttaaacttatgtctcgaagctcatttagttttcattttaagactccactagaagtgaaagacttttttaaagatgcaggctttagtcaagttaacgttgaacaaccgcaaatattctttggacaagtttctaaaaacagcgatgaagagcatttaggggacttagtctggactatccatactcaattaaagtaaaaaaatggaagcctcgtgagttttgaggcttccaaatcataaaagaattaaacgttaagctgcttgtttctggcgagtaatgaagcggcttaaacggtcagcaagttcaaaactaccatgtttaaataaggcacggactccttgttcagtagcttcaaagattaaacactcaatcgaaaaagcgccctcttcatcttctaaatgtaaagccaaatcacgtggatgttcatttacaaactcaagctgtgctacatcatctaatttcaaatacattccaaaaaaagtcacatcaataatcatcactggcacctctgtttcacattcacggtggctcagtttcgttttaggctggagaactggtatacgctcttcacctcggcgttccatgttttgcatttgctcacgcgtcattggaataatgccatccagattttggataggttcacctttcaaaaatgaagtgaacaaactcatagtttctttacggcgctggagctgcggcacatggtcggcgttagcaatcagagcaaattccatatctggacattgcaaagcaaaattggcattttcatgaggcaaagtaaaactatcgtactgccctgctgcgaccagtgtcttacattctggaataggtacatctgttaaacgcaaaaggcgattacagttaatttcataacgttctctttcagtacccgtaaattctgccatttgcctaaaaaataattttttagctgtaggcgacatacgtgttttatctaatttggcatgattcaccaaatataaaattaccgcttgcccaaactcttccatacgattttcttgcatgagtttgagcgactcttccagaatcatccgccagcttttacgggtcttttgcataacacccattaaaatcatacggtccatcaaatctggacgatgataagcaaaacatgaagcaacaactgaacccaacgacattcccattacagaaactttttgaattccgacgatatctagccaacgtcctaacatttccgacaaatcgggaagctctaatgttccagcagaaattccggtatctcgattggtaatttgttgatttgcgcccatagatggcaagtcgattaaaatcaccgggccactttcaaatagttgttcaacacaatatttatacgagttaaaattttgaaaagcaccgccaacaatcacaatcggtgttttgtgaatcgtttgtgggtctgcaatcgccatatattcaattttccaaccgtcaatccatgtggtacgagctggctgtttaaaactatctctatggtagatatcgaaaaacccaaaaccggcataagcttggtttatctccgaatccatttgaataatggaattcatatccttgcttcctccttgctgtaatttttttatgctgcaagagttccttcttgaacacgtaatcttttatgcacaaatctttaaaatttgtatttgtttgtattgcacaataacattctaaacaattgtctgaaatatacgcaatcgctgaattgaccgctcatcctgtttaagccgcgaatagtttgcaaaatatttaaatgtttttttatagcggtcacatttttccaaaaaagccattcattgttccgcatttgactgctactatcgtagtcattggtaaatgattaaaaaatgctatgcaagattcaattgaacaatatatgcaaaaagttgggcaacaagcacgtgatgcttcacgcgtcttaacaagtgcttccacctcacttaaaaatcatgcactctctgctatttatactgctttggaaaacaaccaagcagctatcttggcggcgaatcaaatcgacatggaaaaaggccgtagcaaccagctcgacagcgccttacttgatcgtcttgagcttacgcccgcacgttttaaagggatgttgcaaggtttaaaagatgtgatcgcgcttgtcgatccaattggggaaatcacggatcttgcatatcgccccacaggcattcaaattgggaaaatgcgtgtacctctaggtgtcgttggtatgatttacgaatcacgtccaaatgtcacacttgaagctgcatctttagcaattaaatcgggcaatgccattattttacgtggtggctcagaagcacttgagtcaaataaagcaatcgcagaagcggtgaagcatggcttaaaagttgctggtttacctgagcactcagtacaagtgattgaaacttctgaccgcgcagcggttggtcacctcattactatggctgaatatgttgatgtcattgttccacgtggtggtaaaagcttaattgagcgtgtaaccaacgaagctcgtattcctgtgattaagcatcttgatggtaactgtcatgtgtttgtagaagctcaagcagacttacaaaaagcgttaccaattaccttgaatgctaaaacacatcgttacggcgtttgtaatgcaatggaaactctgctcgttgatgaaaaaattgcagaagttttcttaccacacattgctgagctttatgctgaaaaacaagttgagctacgtggttgcccagaaacacgtcgtattttgggtactactgtcaaacctgcgacagaagaagattggtataccgaatatctagggccgattcttgcagttaaagtggtgagtggtattgatgaagcaattgaccatatcaacaaatatggttcgcatcataccgatgcaattgtgacagagaactatactttggcacgtcagttcttggctcgcgtagattcaagctccgtcgtagttaatgcatcaactcgttttgccgatggctttgaatatggtttaggtgctgaaattggtatctcaacagataagattcatgcacgcggccctgttggcttagaaggtttaacttctcaaaaatggattgtgttaggtgacggtcaaattcgtcaataagtctcctacttaaataaaaacgcctgatccatatcaggcgtttttattttgttatttcccacagaaaaaccagcccgaaggctggttttttttaaccatagatcaattagaaaataaagtcggtattcacaaatttcgaatagtgctcagacaccatagaagccagcatacctttactgtcatcagtctgtttagccgcaatcatagagcgaatcgagaatgcacgaagtgcatcatgcacagaaagtgtaccttctgctgaatctttacgaccaccaaatgggaatacatcaggaccacgttgacactgacagttgatgtttacacgacaaacttgatgtacaagtgtatcgaccaaatggccaatttgcgctgggtcactaccaaaaatactcacctgctgaccatgatcagaagtagtgacataatccaatacagtttcaatatcatcataaacagcaactggtactactgggccaaactgttcttcgcgatacagtctcatcccctcagtcactggataaactacggctggatagaacatggttttgcagaattcacccccttccggattaaccacttttgctccttttgccacagcatcttcaatcacttcagtcatgtaggctgtacggtgcatgcccggtagcggcgtaatagatacacctttttcccacggcatacctactttcaacttagccagctcagtcgttaaacggttaacaaactcatcggctatcgaacggtgcaccatcagcatttttaaagctgtacaacgctgaccattgaatgacaatgcacccaacaggcactctttcactgtcaggtccaaatcagcatctggcaaaatgatagctgcattcttcgcatccaaccccaaaatcgcacgcagacggtgagatttaggatgttgctttttcaagtggtcggccactttactagaaccaatcagtgccagtacattaatttgcccagatgccagcaaatgcggcaccactagagaacctggtgcataaatggtattgatcaccccttttggaaatgaatcacgaaatgcctctagcaatggttcaaataataaggttccaaattgaggtggtttaaaaataatagtattacccatcagcatagccgggatcagggttgcgaaggtttcattcagcgggtagttgtatggtcccatacacaacacaacacctaatggagtacgacgaatttgaccaatggtgccttcagcaattacaaagcgggagttggcattatccagatctttcagggcatcaatggtttgacgcatgtaggtaatagtacgatcaaactctttctctgaatcggccaagctcttaccaatttcccacatgatcagcttaataatcagatctcgttgctctaccatgcgctgaataaaattttgcatacaagcaatgcgctcactaaccttcatcattggccattcgccacgaccattgttgtaagctcgtaccgctgcttctaatgcttcatcactttctttttcgcccatgactggataactaccaagttcaacttgctctaggctaccgtcaggctgctgaatccagattggagataatgttttcttggttgcaccagcccataacttcaactcaccatccacgagtgaaacacgctgatgaatttgagatggcaaacgtacactttcaggaataccgtccactactgggaatttatgctgtaaattatttaactgattcattcttcttaataccttattatttgtatgtctttatatatccccgaaccgtacactgtaatcagttcttcttcggatcaataccactattattatcagtactcaccttgcttgaaccgtagaccacaaggtgaattcttaaagcatggatagtttcgatattttctagatgaatttacccccgacacacactatcagttacccctagcttttggataacttgttcaatgatctgttctggtgtgagagcaatatcaatagcaattgcttcattcacatcaggttcctctaatgtatctagttgggtttgtaacaatgccggatcaaaaaaatgaccagatctttctgcaagtctttgctgtaatagttcataagaaccttttagatatacaaacttaacattctggtcctgccctcttaaaatatcgcgatacatccgctttaaagatgagcatgtaaacacagccgtttcaccatctctttgttttgcttcaattgcctgacgaatagcttgcaaccacggcaagcggtcttcatcggttaaagggataccttggctcatcttacttttatttgcagctgaatgaagcgtatcgccatcaagaaactcacaagccaaacgctctgataacaactcaccaataagggttttccctgtgccacaaacacccattgctatcactatcatggattacctacctctaattacaaaacagcactaagcaacaatgtgaaagacaaaccaagtaccgaaataattgtttccagtacagaccaagtcttcagtgtctgcccaactgtcattccaaaatattctttgattagccagaaaccagcatcgtttacatgcgagaaaattaatgatccagaacctgtcgctaatactaaaagttcaggtctaacgactacacctgctgctgccgcaataggtgcgacaatgctacaagccgtggccatcgcaacagtagccgaacctgttgccagacgtatgagagcagcaacaagccatcctaataacaatggtgaaaggtttgcttttaaagcagtagagacgatttcattagaaattccactgtctcttaaaataccgccgaaaccgccaccagcaccaacaatcagcaaaatacccgcaattgaagctagacatccaccacagaatttttcaatttgttcacggttaaaaccctgcatagtgccaaaagtaataaagctgaccaaaacagcaataagcaatgcaatatcagaagtaccaataaagcgtaataactcatttgggaatgtttttggtgcaaagaaaacatctgcccaactaccaactagcatcaatgcaaccggtagcatgatcgtaaataaggtaatcccaaagctcggcaattcacgtgtgttgttagcatctgcttcaacaaactgctttgctaaaggattattttctggcaatttgacatatttgttaatccataatgcatacaatggacctgcaacaactgctgtcgggacgccaaccaataaactgtacataatggttttaccgatgtcggcatggtaagcctgtaccgcaagcaaagcggctggatggggtggaatcaacccatgtacgaccgataaacccgcaaccataggtaaaccaacaattaataatgatttacctgtacgtttggcaatattgaatgcaattggaataagaagtacaaaaccaacttcaaaaaataccggaagccctacaattaacgcaatgaacatcatggcccagtgaatatgtttttcaccaaaccatttaattaaagtaattgctattcgttctgcaccgcctgactcggccatcatcttgccaagcatggttcctaacgcaatcacaatcgcaaggtgacctagtgttttaccggtacctgcttcatatgatttaacaatcccgtccattggcatgccaactgcaagagctaaaccaagagaaacaataataagaactaaaaaggggtaaattctaaacttcgcgatcatgacaatcaaagcaacgatcgcaattaaagtatagacaagcaacatgccaccctgaaccgtctccatgtgacactttctccttggaataatgttatctaggcactgcctaaataaaggtcttcaaccagagatatactcattgttgaagcactcattttttatatttagtatgactagcaaccgccagtcacagcatcacaaaaaatctaaagcacctaaaagacactttagatttttaaaccacaattactttcgtaaaactcataactgacttgcaatttgggctaaacgggtaatttcagcccaatcttgtgcagcgacaacaggtttaggcgttaaccatgacccacctacacacaccacattaggttgctttaagaaatctggagctgtctctgctgtaattccacctgttggacagaaacgtaagtttggaaatggaccataaaatgcttttagcatctcaaccccacctgcctgttgagcagggaaaaacttcacaatgtcgtagcccaactcaatcgcttgaatgagatcactcggtgtcattacgcctggtaaaagaggtaaacctgcatcttgtgcagccaaatgcaagtctttggtcaaaccaggtgataccccaaatttagcaccagcttttttagcttgtgcacaatgctcaggcttagtaatcgttcctacacctaccacaatgtcatctgctaactgagatgcacgttcaatggcagcaagcccagctgctgtacgtaaagtaatttccagtacctttacaccaccagcatgcaacgcacgtgatacatgttcaccttgttcggcagagtcaaaagccaacactggaattactggacctaatttgacaacatcttcaatcttgctcattactttgtaattcctttgtcttaaatctgcccttgtggctcttcgccaacaagtgcaccaaacacagatgcgccatgttcagcaggcgctgctgccgcacggaacacaccaaataattcacggccaaaaccaacttcgttttctgcctgatgttctggttgagcaacaggacgtgactgccaagtctgctcatctaactcaatatcgagtacaccagcttcagcatcaatgattaacatatctccggtttgaactttgccaatcggaccattcaataacgcttctggagacaaatgaatgactgctggcactttgcctgaagcaccagacatacgaccatcggttactaatgcaacatggaagccttgatcttgtaaaacgcccaacacaggagtcaagcggtgcaactcaggcataccattagcacgcgcaccttggaaacggacaaccgcaataaagtctcggtgcaattcaccacgatcaaacgctgcctgtaccgcttcttgcgaatcaaaaacaattgccggtgctttcactttacggtgctctggtgcaaccgcagaaatcttgataacaccacgaccaaggcgaccttgcattaagcgcaagccgccatctggctgaaacggcgcatcaatgctacggagtactttgtcatcaaggctttgaactaccccgtcaacccaagtgagcttaccgtcaatcaatttcggttctttggtgtaatgcagtaaacctttaccagcgacagtcgtcacatcgttatgtaacaaaccagcctcaagtaagttacgaataaggaatgctaccccacccgcagcttggaaatggtttacatcggccttaccatttggatagatttttgcgagcaatggaacaacagcagacaactcatcaaagtcatcccagtcaattaagatgccagccgcacgcgcaatcgcaataagatgcaacgtatggttggttgaaccgcctgtagccaataaagccacaatgccattgataatggctttttcatcaataacatggccaatcggcgtgtagttgcctcgctcggcagttaagtcaagtacacgtttagcagcttcggcagtgagagcatcacgtaatggggtatgaggatgaacaaatgccgcacttggcaaatgtaagcccatcacttccatcaacatttggttactgttcgcagtaccatagaatgtacatgtgccctgaccatgataggcagccgattcagcttcaagtaaggcatcgcgtcctacttgacctgtcgcgaattgctggcggattttagctttatcatcattcgacaaaccgctactcattggccccgcagggacaaaaatggttggtagataaccaaactgcaaagcaccaatcagcaagcccggaacaatcttatcgcataccccgagacacaatgcggcatcaaacatgttatgggaaagtgcaatcgcagtccccatcgcaatggtttcacgtgaaaatagtgataattccataccggcattaccttgagtaataccatcacacattgccggtacaccgcccgcaaactgtgcaacaccaccattttcacgtgcagctgtttttataatgtcagggaatgttttatatggggcatgtgctgaaagcatttcattatatgaagacacaatgccaatatttggttcacggccaactttaataattaatttttcattatcttccatgccagcaaaaccatgagccaggttggcacatgagagtgcaccacgagctgggaatttgccttgggcatgttcaatacgttgtaaatatgcagaacgagttttttggctacgcgcaattacacgttcagtaacttttgccaatactggattcggcaagtccatgctggacgctcctgtacaaccggataagccggaacataaaaatagaccaaatgatatatttcatcatcatttgataagggggaggaacaatattattaaggcaaaaagcgacatgcaagccctagtcaactttacggtaatactcgagcatcggtattaaatacaaattatgtttaagttttaaacgagaagctggttttatttttgactatatttattggtatatctgcctctattaactatgagaaaattctcataatatcaaagcaataaaatattcttataaatgtattaataccgacttttttatactaagttttatattaaaaatgtttatgatttattcattttaacctatatataaacgattaaaatttaatttcatttacgtatattatttgtaatactcccctctagtttgattaaaataacagcacttcttttttcttaaaaaatttataccaaatatttgaaaaatacattaaatagaaattcacctttcataaatatatacaaaaaactgtttaattcttctacaaaaaaacaataaatacagtggttaagctttatactgagcgaatattagttataaaaaatttaatggtcgatagtgcttaagtctaatgggctaaagtctatcttggacagaaaaacaacacatgttaaaacatcacaacctgctcttaatgcatcacacaattaatgccttttgatcaggaagttaggaaaactatttttatatcaggacttgggtatttcaacgtggctacatcagtattagttattaattgcggttcttcatctattaaatacgcactggtttcagagcgtcgtgaagatcgtatttacggtttagcagaaaacttaggggcagctgatgctcgtattaaagggattaccgtcggtggagaaccgctagagctttcaattccttatgctgaccacgccaaagctttagaaactttacttgcacgtcttgcaaactataaacctcaagcaatcggtcatcgtgtcgtacatggtggaagccttaccaaagctgaactactcacccctgaaattgtagaacgtattcgtgcagccactccgcttgcaccgcttcataatcctgctcacttaatcgggattgaagcaacgatgcgcctattccctgaattacctcaagttgccgtatttgacaccgcatttcatcaaactatgcctgcacatgcataccgttatgcaatccctaagtttttatatacagaacataatgttcgtcgctatggtttccacggtacaagccatgcttatgtgtctgaccgcggcagtgaactggcaggaaaattccaaaaaggcggttggttaacagcacacttgggcaatggtagctcgacttgtgcagtgtggaatggacaaagtgttgatacttctatgggccttactccacttgaaggtgttgtaatgggaacacgtagtggtgatgtcgatccaagcttacacagcttccttgctaaaaatcttggctgggacttagcaaaaatcgataaagttttaaataacgaaagtggattacttggcttatcacaactctctaacgatatgcgtacagtgattgaagctgctgaaaatggcaatgaagatgcttgccttgcgattgaagtatttagctatcgccttgcaaaatcacttgctgccctaagttgtggtttaccaagtattgatggcttgatctttacaggcggtattggtgagaactcagcttatatacgtgaaaaaactctagcttatttacctcatttcggtttacagctcgataaagaccagaacaacaatttaaaacgtggtacagaaggccgtattgatagcggcacaggtccacaaatctgggtgattccaaccgatgaagaaggccgtattgccaaagaaactcgtcaggttgtagaagtttcacaaaatacatctcctgaagttagccttgcttaattacagaagtcaaaaaacgctattcatttatttataggtttatatgaatacaattttattaattcctacaggtgaaggggttggtttaacctctgcctgcttaggtatgatttatgcacttgattgtaatgggattaaagcaggctttttaaaaccgttctctcaggtagatcaagaaaatttagaccgaactacatctttatttggtcatttatttcaaagcaaaactgtccaatccatttctcatgaaaaactaacccaacgcattgcggctggtgaagtcgatgagttacttgaagaagcagtaagtcttcatcgcagtatcgcagcagataataatgtgattattgttgaaggcttattaccaaatgggcaagaccattttgccagtgaacttaatgcaagccttgcacaagcgcttgatgctgaagtggttttagtcagtacagcagatattcaaaacccacgtaaaacagcagagaaagttgaagctcacttacggcagtttggtggtgcaacctctaaccgaacagcgggcgtactctttatgcgtacacgcgggttatctgaagagacagctcaaatacctgtcgcatttgacccgtcgttacgtccaaccgaagacatcgcaaaatttacggcagaattgcaaaaatataaccgctactttggatcaagcgatttaccaattattggtctagttccgtttagtaataccttaagtgtacctagaacattggatatcgcgagcgtgattgatggccaatggataaatcaaggcgaagcaaaaacacgtcgtattttgcactcaagtttaattgcctcaagcattgaatatgaactgaataaattcattgctggcgaactgattattagcgcttctgaacgtaccgatgtattactggcaagtagtctcgccaccagtaatggcattccactggcaggcttggtgttgactgagcgtgaagctcctgctcccaagcttttagagttttgccaaagtgcaattaaacaagggttgccaattttacatacccatttaaatacactagaaactgcgcagcgcctatccgattttggtaatgaaattccaaccgatgacactgaacgtgccgaacaagtgacccgatttgtttcaagtcacatagatgtcgaatggcttaaacagcatagtaataacggtgctataccacgtctttccccttctgcattccgtcatgaactggtgcaaaaatcaattgcagctaaaaaacggattgtccttccagaaggtgatgagccacgcactattgaagctgctactatatgtcaggctcgtggtattgcgcattgtattttgttagcaaaaccagaagctgtacatgacgtagcaaaagcacgtggtatcgagttaccggctgggttagaaattattgatccagatcagatccgtgaccaatatattgcaccaatggttgaactccgcaaaggcaaactcaacgacctacaagctaaagagcaattacaagatactgtagttctcggcaccatgatgctagctctagatcatgtggatggattagtttcgggggcagttcatacaaccgccaatacagtgcgtccagctttccaattgattaaaaccgctccagcatactcactggtttcatccattttctttatgcttttaccggatgaagtctatgtctacggtgactgtgcaattaacccggatcctacagccgaacagcttgccgaaattgcgattcagtctgctgactctgcaaaagcgtttggaattgacccacgtattgccatgatcagctactcaactggtacatctggaacgggtgctgatgttgagaaagtacagcaagcgactcaaattgcacagcaacgtcgccctgatttactgattgacggtccactacaatacgatgcggcttcagttgaaagtgtaggacgccaaaaggcgccagactcacgcgttgctggccgtgccaatgtgtttattttccctgacttaaatacaggcaacacaacctataaagcagtacaacgtgcagcaaatgtagttagcgttgggccaatgctgcaaggcctaaataagccagtcaatgacttgtctcgtggtgctttagtagatgacatcgtctttactattgcattaacagccattcaggccgagcagcaagctgctgccaaataattaatatcatttaatcttttctacctctcgccatttgatatccgctcaaatggcttttttattttttaaagaataagcctgattctaggttgttcttaattttaaataacttagcctttgtgttattcgactttcggtcaaaagatcaaccaatcccccacaagattgtctttttgtcatataatttagcccgctagctaacagcccgctcaagagattttttggtatgacaacgattatcaaacaagatgacttgattacatcaatcaaggacgccctacagtttatttcgtactatcacccgcaagactttatccaagcgatgagccgtgcttatgatcgcgaagaaaacaaagctgcaaaggatgcaattgcacagattttaattaactctcgcatgtgtgcggaaggtcatcgtccaatttgccaagatactggtattgttaacgttttccttgaagtgggcttagatgttaaatttgatttaacaatgagcttagacgatgcagtaaatgaaggtgttcgccaaggttaccttgaaaacagcaacgttcttcgtgcatctgttcttgctgaccctgcatttggtcgtaaaaatacaaaagataacacccctgccgttattcactacaaactcgtaccaggtaacaaagtagatattacagttgctgctaaaggtggcggttcagaaaacaaatctaaacttgcgatgcttaacccatctgactcgattgttgactgggttcttaaaaccgttccaactatgggtgcaggctggtgtcctcctggtatgctcggtatcggtattggtggtactgctgaaaaagccatgatgcttgcgaaagaagcactcatggaagaaatcaacatggacgaattacttcgccgtggaccagagaacaaaatcgaagaacttcgtatcgaaatctttgaaaaagtaaacgctcttggtattggtgcacaaggtcttggcggtttaaccactgttcttgacattaaaatcaaagactacccatgtcacgctgctggcaaaccagtaggtatgattcctaactgcgctgcgactcgtcacgctcacttccagcttgatggttcaggtgtagctcatattcaagcaccaaaacttgaagactacccatctgtaacttgggatgcttcacaatctaaacgtgtaaaccttgataccattactcaagaagaaatggattcttggaaaccgggcgacacattacttcttagcggcacaatgtacacaggtcgtgatgctgcgcataaacgtatggttgaaatgatcgacaacggtgaagaattaccggttgatcttaaaggtaaatttatttactacgttggtcctgttgatccggtacgtgatgaagtggttggtcctgccggtcctacaactgcaacacgtatggataaattcacacgtaaagtactcgagcatactggcctattcggtatgatcggtaaagctgatcgtggtcctacagcaattgaagcaatcaaggacaacaaagcaacttaccttatggcggtgggcggtgcagcttacctcgtatctaaagctgttcgcgaagctgaagtggttgcatttgcagacttgggtatggaagcaatctacaaatttgtagtggaagatatgcctgtatctgttgcagttgatgtaaacggtacatcaattcacgcagtagctccaaaaatctggcaagcgaaaattggtaaaattccagtaatcgatgccgcagctggctaatcaagaaaagcaccggattcggtgctttttttatgccttttaatatttttttgaaattgaaaagaattgtaacaattggttcgccaatctgtgctattaatgaatacacccacccgccctacactgcatataggtcatttcatgactattcgccctattcttaaaaatctttcaatcagtctctgtctaagctgtattactacaagcttatttgcttctcctgccaagttaagttcagtgaaagaactcatgcaaatgagccaaattgattatctattgaaagaatcaatcaatgagttaacgccttactatgatcaacaggctgaacagatcattagcaatattacgggcatcaaaactttaggcccgaaagaaaaagaggcagcgaaaaagttaggcttacttttaaaagattcgagtaaccagctgattagtagccctaaaacgactcaagccttacaagatatttatttaaaaacttataccgaagaagaaatccaagcaaatttaaagtttttgaaaaccccagaaggccaatcaattacccgtaaaaacgtacagattatggggcaaatttcagaatatatgatggaattgggacagcaaacttttaatgaccctaaagcacgagatcatatgcaagaagaaatgctaaaaattattgcacccttaatgaaagataaagaaaagtcttaacttttctttatcgacctcaaattgttaccacgttaaggggttccacaatttaaatggttttatcagatgtacatctgacttttcattatatttagcaggttttaattcttggggcttatgacgtatttttcctgaagcatcttcagcaacaaaattatagctagaagatttaagctcggtaaatgcaatttctctacgaccaatattatcttgcattaacataaatggacccgtgtgctcactacggtccattttattttcttcatcatacttcaaataataagatgcgcctgcatctaccgtaatatcgatatatttaggttcttgaaaatggatccccaacaaagggcggctcgctgaaatacggtaggttcctgctggcagttcaatccagtaataatggttatgcaataaacttggaattcgtttgccatttacaaataaattgatggctgcaatttcttgacgattccatttcgtgtctggacggtaaagatagacaactgctgcctgctcattttggggtttaactggcgcaaatgtctgacctaacttttgatttacccatccccctacagtgaagccccctaaacgatattgatccaataaaccgggttctttatcaacatcaactttaggtaaagtggcagtcagttcacctgaattcttttctaagtgtgatgaactttggcaacctgcaagtaatgtggcacaacttaaagcaataattaaataacgcatgacatccctcaaagcgttttcttttgatttttctatatcgcaaaactatgcgtattttgtttttttagattaacaccacctacatgaattgaaaacaaaaaaagcatgaatcaccgaggcaattcatgctttttagatgaatgaaatctaagcagacttcgaatcaattacttttaaatctgccttagcaacactttcatgtgttactgcttctttaggctgacgttctgacttgtagacaggttcagcttcaccattaataactgcttcattaatgaaaactgttcctacatctgtacggcttggcaagtcatacatcgtttcaagtagaacattttccaaaatcgagcgtaggccacgagctccggtattacgctcaagcgcacgcttagccactgcacgtaaagctgaatcttcaaatacgaggtcaacattttccatattgaacaggtattgatactgacgagttaatgcatttttcggttcagtcaaaatttgcattaacgcttcttcatcaagctcttcaagcgttgcaatcactggtaaacggccaatgaattctggaattaaaccaaatttaactaaatcagttggctcaacttgacggaataattcagcaagttttttggtttcatctttgtttttaacatcagccgtaaagccaattccgcctttctcttgacgctgttgtacaattttttccagtccagcaaatgcaccaccacaaataaataggatatttgaggtatcaatttgaatgaactcttgctgtggatgcttacgtccaccttgtggtggaattgaggctacagtaccttcaatcatcttaagcaaagcttgttgtacaccttcaccagacacgtcacgagtaatcgacggattttcagatttacgtgtaattttgtcgatttcatcaatgtagataatacccttttgagctttttctacatcgtaatctgctttttgcaaaagtttttgtacgatattttcaacgtcttcgccaacataacccgcttccgtcaaagtagtcgcatctgccattgcaaacggcacatctaataaacgagccaatgtttgagcaagtaatgttttacctgaaccggtaggcccaatcagtagaatgttacttttagcaatttccacatctttagacacatgaccagattgcccgacttttaaacgcttataatggttataaacggcaacagataatgtctttttggcaagatcctgaccaatcacatattgatcaagcgcagcacgtatttcatgtggttttggcaatgccttgcttgcccagtcacctgcttcaacctgttggctggtttgtacaaggtctaagcagacatctacacactcattacaaatatatgcgtcctcgcccgcaatcagtttcccgacttcagactgcgttttaccgcaaaatgaacaatgtttttgtccttgaggatgttcggacatattctctccacaaatagaatcttaaatatgagggcaagcgatagggttaaatgactatatggaggcgttttccaacaactcaagccacttaatattttcccttatggacgcttacttaatacctgatcgaccaagccatattcttttgctgcttgtgcagtcataaagttatcacgatcggtatcacgagcaatcgtgtcatagtcttgaccactgtgttctgccatcaaacggttcaagcgctctttaataaatagaatttcacgagcatgaatttcaatatctgatgcttgaccacggaatccacctaatggttggtgaatcattacacgtgcattttcaaggcaatagcgtttacctttagcaccagcatttaataagaatgcgcccatagatgcagcctgccccatacagtatgtcactacatcaggtttaataaattgcatcgtgtcataaatcgccataccagcagtgaccgaaccgcctggcgagttaatataaagatggatatctttatctgggttttcagcttccaagaacaacatttgggcaacaatcaaatttgccatgttgtcttcaacttcaccagttagaaaaatgacgcgctcacgtaaaagtcgtgaataaatatcaaaagaacgttcgccgcgagaagattgttcaaccacaacaggaactaaagcattttcaattgttggaacatacatacgttatttattcctaaattttttgtgacttaacctatggcaacaatatgcgggataatttctcaaattgcaaaaggttcgcactgaaatattatattatttatacctaagtacttaagacgtactcaaattaaccatatacctaaaaatgaaaaaggcgcctaaagcgccttttcctgacttctcaaaagattagcccatacggcgagcttgttgttctttcaataaatcttcataagatactgctttatcagtcactttagcagaagctaaaatgtgatcaacaacttgatcttctaacacaacagcttcaatttgagcgcgttgttgagcatcatttttgaagtattcaatcacttcagttggatcttcataagaagaagccatgtcgtcgatgtaagcatcaacacgtgcttggtcaacttcaagtttagcatcagctaatactttgcttaccaatacgccaagcttaacagagcgttctgcttgttctttgaacaattcgtcaggaagcatgctcttgtcaaaagattgcgcgcctgcaccaccaaattgttgagtgaactgttgaaccatttgttgacgttgacggtcaatttcttgagcaaccattgcagctggaacttcaatttcgttagcagcaacaagagcatcaaatgcagcttgtttaacttggttacgtaaaccattgcgaacttcacgttccatgtttttacgaacgtcagcttttaatttttcaatgccttcttcttcagaaacaccgaagatttttaagaattcagcatcaatctctggaagtttaggcttttcaacttgcttcacagtgattttgaactgagctgctttacccgctaagttttcagcttggtaatcttcagggaaagttacatcaataactttctcttcaccagctttcatgccaatgatgccgtcttcgaagccaggaatcatacggcctgaacctaacacaagtttaaagtcttcagcagaaccgccttcgaacttctcaccgtcgatagaaccttcgaagtcaaaagtcacttgcatgtcttttttcgccatacccttggttacagcccaagtttgacgttgcttttgcaagttttcgatcatggtgtcaacgtcagcgtctttaatttcagctgttttacgctcaacttccaaaccgtcaaatgcttttacttcaacttcaggataaacttctacagttgcttcaaaaactaaagcatcttctttatgttcaactttctcaatgttcggcatacctaccgcattgattttttcttgttgaattgcttcaaatacgctgtcacgaatgatgtcattcacaacttcttgataaatacttgcaccgtattcgcggcgaacaacgtttgcaggtactttgcccggacggaagccgttgatcttcacagttttggcagtgcgcttcaaacgagcttcaaattgctcgttaatacggctcgtcggtacagaaacatttaaacgacgggcaacgcccgaaaccgcttcagtcgttacttgcatggcttcctcgataaaaattagttagtaggaacagtttttaaaaaagtgctgtattatatgacaacttttaagatatacaaaattaaccgatcagatcataaaattgaaggacgtatttttaggaaatttcacagtaattttatgattttttaattttttttaatgcaacgttaagcaaaagtaattttttaactattctttacaaatctaaaattacaattaattttaataaagttatcgtttttgcaaacagttaagtttaatcaatcaattagagccattttgtaactaaaagtgattaaaactttcacatttccttcacaattctatcggcaaatccaattaacacaaactgtacatataaataagaattattattattcgcataacgtttatatttaagtcctgaaagtcatgtcattgattagaacacgtaaaaaaattgtttcctctgcaatcgcctcatcgctctcgatgatagcaacaactgcgatggcgcaagaagcagtttcgcaattaccaactatccatactaaagcgactcaagaagaatctttaaaggttgatcaatcagcaaactctaaatttgttgctccccttctagatactcctaaatcagtatcagttatctcaaaacaacttatagaagataccaaagtaacaactttagcagatgcattgcgtactgttcctggcattactttaggtgcaggtgaaggcggtaatccgaatggtgatcgacctttcatccgtggttatagttcagaaagctctatgtatattgatggtatccgcaactctacctcacaaaaccgtgaaatgtttgcggtcgagcaagtagaggtaaccaaaggttctgcatcagcaatgggtggtgcaggttcagttggtggcagcatcaatatgatttccaaggtagctaaaaagggtgattttctagaaggctcagtagccgctggtactgataactaccaacgtatcactttagatggtaataaagactttggaaatggcattgcagcacgtgtagctgttttgggacatcaaaatgaaaaggctgtccaaagtaatggggctgaatataaacgtgttggtattgcaccaagtattacttttggcttagatacaccgacacgtgcaactttgagctactattatttacaaactgatgataaacctgattcaggtattccttattgggattcatctcttggaaaagctcaaggtaaaccggctgaagtcaaacaaggtacatattacggctggaaagatcgagattttcaaaagcaagaaaatcacatcggtacaattaaattagaacacgaccttaccgacaatataactattactaatacggccatgtatgccaaatcaaaaaatgattatgtctggacaaacccagatgactcaaaaggtaatgttggcaaaggtcttgtttggcatcgtttgaactcagctattacagatagtgagacatttaccgatcaattagcacttacaggtaaatttgatactggcttcttaaagcacagatttaatgtaggagcagagtacagcaaacaaaaaactgataaaggcggctataacattattgatgccaaaggtaatgtttctagtactggcttctatagcgattgttcagacttatcaacaaattggtgtacttcgctcaatggtccaactcaaaagccatttgttgaccgtttacaagcacgcccagactttgatgcaactgtagaaagtacttctgtctacttactcgacaatattgagatcacaccaaaatggttattagatcttggcctacgttgggataagtttgaagctgaacaaaacttcttagccacttctagtgcagcggcctatacagcaaaaaatgattcagatttcgtgacctatcaagcgggcattacatttaaaccaacagagaatggctcaatttatacaagctatgcaacctcagctagtccagtcggcttaaatgcaggttggggggataatagcgaaacaattaatgccaataatcaaatgattgatcccgaagaggcacaaacatttgaaatcggtacgaaatgggatttcctagataaccacctaaatttaacagctgctattttccgtactgaaaaacaaaatacacgtgtacaaatcgacccaactacttatgcaaatgtaggtgaaagtaaagttgatggttttgaattaggcttaaatggtgaaattactgataaatggaacatttcagctggctatacttatttagacagtgaactaaccaaaaatggtaaatcttgccgtagcggaaaatgtactgaccaatccatttataatggcaaccaaatgccaaacgtacctaagcaagctgctacgttatggactacctatagagtacttccacaattgacggtaggcgctggcgctgtttactctgacaaagtatatggtgatgtagcaaatactaaatgggttccatcttacgtacgttacgatgcgatggcacgttacaacgtaaataaaaatgttgatcttcaattaaatatcaacaacctatctgataagcgctatttcactaaagcttacgcttctcactatgcaacagaagcagaaggccgtagtgcagttctagcagttaactttaaatactaagttaacctagaatcccataatatttttatggtttataatataaaatagcctctcttgttagaggctattttaattttctactattattactcgcaggtatcaccgtgatccatcatattcccaatgtcttgagtaaagagcaggtccaatattttcgtaatgaaatggataaaattgaatgggtcaatggcaaagtaaccgctggtacactctctgcaactgtaaaacgcaatcagcagctacctgaagatcaccctcttactcaccatctcagcaatattattcttgaggcactaggcacacaccctttatttttatctgctgcaattccacttgatatcatccctcctctttttaatcgttatgagaatcaggagtcttttggtttccatgtagataattctatccgacgcatacgtggtacaaatgaacggcttagaactgatttgtcatgcactttatttttaagcgaacctgaagaatatgaaggtggtgatctggtcgtagaagacacttatggttatcacgaagtgaaactcccagcaggagatatgattttatatccatccaccagcttacatgaagtgactgcaattacttctggctgccgtattgcttcttttttctgggtgcaaagtatggttcgtgatgacgccgagcgacatatgctttttaacttagatcaaacggtacaaaacctaagaatgcaactgggtgataatcatagtgaagtaattaaactgactaacctttaccataatctcatgcgtaaatgggctgaactgtaacactatttatttttgccttatttgagctaattaattatttttacctcaataaggcaaaataatgaaaattattttcaacaaaacataaaacaatggaaaattagaaaattattttctaaacactgaaattaaaatctctataagacttttgcacaacgtgtaatcatcgtttagatgtggtatatctaaacaataagcatatttgcaaaccaccaaacttactatttcatggtctatagatgaaaacgaattacttgtttgcccagcctactcaagcaagacatcatctcgaactcctgatgctgcgcctcgcgcgcgtataaatttttgtctgtattttagagcagaccttttcaaattccctttaatttttctgtattagataccatatataactgtagacgttgcctttcacacgatacttgacgcaaccgtgctacgagataaggagttttctcatgatgttggctgaccctagcaaaaaataccgccgtatgtaccagcgagtcgatttaccagaccgccaatggccaaataatgaaattacaaaagcgccaatctggatgagcacggatttacgtgatggtaaccaagcaatttttgaaccgatgaacatggaacaaaagttcaaaatgttcaaaatgcttgtaaaaatcggttttaaacatattgaaatcggcttcccttctgcgtctcaaattgacttcgattttactcgtatgttgatcgaagaaaatcatattcctgatgatgtatacattgaagtattggttcaggcacgtgaccatttaattgagcgtactttcgaagctttagcaggtgctaagcgcgcaattgtgcatatttataactctaactctccaactttccgtcaaaaagtgttgaatgtagatgttaatggcgcaaaacagttggcggtgaatgcagctcagaaagtgaaagaatatgctgcgcaatatcctgaaactgactggattttccagtatagcccagaatgcttctctgcaactgaattagaagtagcgaaagaagtctgtgatgcggttacagaaatttgggatgcacgcccagatcataaagttattttgaacttacctgcgactgtcgaagtttcaacaccaaatgtttatgcagatcaaatcgaatggatgcatcgtaatttggcacgtcgtgatggcgtgattatttctgttcactgtcacaatgaccgtggctgtggtattgctgcatcagaacttgccattatggcaggtgccgaccgtgtggaaggctgcgtatttggtaacggcgaacgtaccggtaacgttgacgttgcagcaattgcattgaacatgtacacccaaggtgtagcgccagaattagatttctctaatattaatgaagtcattgcaacggttgaagaatgtactggtttacctgtacaccctcgtcatccatatgcaggtgacttggtatttactgcattctctggttcgcatcaggatgcaatcaaaaaaggctttgaataccagaaaaacgaagaaatctgggatatgccttacttaccaatcgacccgaaagatttgggccgcgactatgatgctgtcattcgtgtaaatagtcagtctggtaaaggcggtatcgcttacttattagaatcaaactataacgttgtattgcctcgtcgtttacaaatcgaatttagtcaggttgttcaacaatatactgatgagaatggtacagagattagtgctaaacaaatctggaccttatttaaagacacgtatgttgaagtgaaaaaccaccattacacggtcaaaaactataagttatctgacattaatggtactcaaattattgaacttgagattgatgttgaaggtgaaactcaacaattacgtggtgaaggtaatggtcctatctctgcattcttaaatgcacttcaattaccaattgatgtattgaactacgaagaacgcagtattagttcaggtgcaaatgccaaagcattaaccttaattgaacttcaagtgaaaggtacaggcagaggctcatttggtgcaggtgttcacgacaacacagtcacttcatctattgaagctattattgcatgtaccaaccgtttgattgatcaaggtgttttaagtacagatcaggttgttgccgccgctgtttaattaaaaaaagactttggaaaggatacctagcttggtatcctttctttttattcctgaaagatttaaaaggcgaaatgttcccgtgtcttttccagctgactcagtggggttagtcactccgcaaaagttccaatttgaagaacccttacatcttgaatgtggccgtgttttaccgcgctttgagttaatggttgaaacttacggcactttaaatgcagataaatcaaatgcgattttaatctgccatgccctttccggacatcatcatgcagcgggttatcaccatgaagatgataaaaaagctggatggtgggatagctgtattggcccgggcaaggcaatcgacacaaataaattttttgtagttgcgcttaataatattggcggatgtagtggatcaaccggtccaacttcaccgaatcctgaaaatgacaatcgtccctatggtccagatttcccgttagtaacggtccgtgactgggtcaaaactcaagccatgctttctgaccgcttaggaataagtgtctggtatgcggtggtcggtggttctttgggtggcatgcaagcattacaatggtcggtagactaccctgaccgtttacaaaaatgtgtcgttattgccagtgcgccaaagctttcagcacaaaatattgcgtttaacgaagtggcacgtcagtccatcttgtccgacccggacttccatcatggccgttatttggaaaatgatagctatccgaagcgtggtctaattttggctcgtatggttggccatattacttatctttctgaagaagccatgaaacaaaaatttggtcgtgatttaaaatccggcaagtttatgtacggttttgatgtcgagtttcaggtcgaaagttatctccgttatcaaggtgaacagttcagtcgtaactttgatgccaatacttatctcattatgaccaaagctttggattattttgatccatcgcgtgagtacggtcactcgcttacagaagcgatgagtaaaaccaaatgccagtttctgattgtctcattcaccactgactggcgttttgcaccaagtcgctcacaagaaattgtagatgctctcattaccaatcataaaccggtaagttatcttgatattgatgctgaacaaggtcatgactcgttcttattcccgattccactgtatgtcaaaacactgcgcgctttcttaggcggtgaagaacatttaaaatcgacttcactggaggcaagctaatgcgtattgatcaacaactggcagaaaagtggattaaacccggctctagcgtactcgatttagggtgtggtgacggtgaattactcgctcatatgagccaaaagcatcaaattcgtgcttatggtttagaaattgatcaagaaaagattgcaattgccgtcagtcgcgggttaaatattattcaacaagatttgaatctcggtttaagccgttttgccgaccagtcttttgactatgtggttatggcacaggctttgcaagccgtagatgcacccgatgttttattaagagacatggtgcgtgtgggtaaacaggccattatcacttttccaaactttgcacactggaagactcgctcttttctagcattaaaagggatgatgcctgtatcggatgctctaccatatatgtggtataacacccccaacattcatttatgtacgtttaaagatttcgaagcactatgtgcggaaaatcaaatacaaattattaatcgactcgccgtcaatggaaaccagcagggaagcctgttaagcaaacatgttccgaatttgtttggtgaagtcgctatttatcgagtgagtgcactatgaaaaagacattatttagcacactaattgcaggactgctaagtatgcaggctcatgcagattatatcgcccagccacaatcggttgcgagccaagctgcgcgcttctccacaatggggattcatgaccttcaaaaagctgctcaagcgggtcaagctggagcacagttttatcttggtacacgttatcaatacggcaaagatgtagcaaaagacgataaacaagcatttgcatggtttaaaactgctgctgatcaaggtctttcacctgcgcaattaaatgttggccgtatgtatgctgatggtattggcgttaagaaagacgaagctatggctcgtaaatatttcgaaaaagcggcaagtaacggcgataaccgtgcaagctacaaccttgcgatgatggaagagcaaaagaaaaactacgtaggtgcttaccagtggtatgaactttcaactcgtgatggcatgctcgacaataaagtgattagcttatctgaaggtaaaaagacggctcttgctgcaaacttaactcaagagcaaatccgtatggcacgtgaccgcgcggataaatggattcaagcacaataataatccagcttatacttactcgactaaaaccaccttatatcacctataaggtggttttagttttttaagcttctaattttatattccatttgttttgctctatatcccctttcaaaaaacacgtaacatagctcacgttcaatattggttataaagtttggttatcttatgtctaccccacattggtttgatcagggctctttagtccttgcaagtaacaacaaaggtaaagtcgcagagtttgaaaaactttttgaacagctcaagttgcctgtagaaattattcctcagggtcacctaaatattcccgacgccattgaagacggcttaagctttattgaaaatgccattattaaagcgcgtcatgcctctaaaatttcagggaaacctgctatggctgatgactccggtatttgtgttccggttttagggggtgcacctggtatttattcagcacgttatgctggagaacatggtgacgatgcagcgaataatgccaaattattaaatgaccttttgccatttcgtaaaaatggtgaagcgattgaaggtatgtttgtgtgcgtacttgctttagtgacgcatgcggaagatccattgccacaaattttccaaggcatctggcatggtgaaattttagaagcgccacgtggtgaaaatggttttggttatgacccactgttctggttaccagagcttcaagtttctagtgctgagttgtctaaagaagaaaaaaataagattagtcatcgtggacaagcgatgcagttatttagagagagcctgcagaagtaggctgatcacagggccaaactatacagcgttaaaacagattaaactttgtataggcgaaccttacttttcaaagatgaaaagtaagcaaaaatcttttgttagactgatggcacttccctgtgccacagtctaactggcggcatccatgccgccttcgcacaagtaaatgtggggaagaaaatttaaaattaattataatgctacatgtaaaaacatcgcataaatcgcaatacacacacaactcacaatcgtccctgaagcgatataagcagcagatctacccgtgccttgataatgggtttctagagctacaatattggctgccggtggcaagcaaaacattaaaaacattacaccgatgtgctgatttatatttggaatctgtaaaaatctataacttaatccacaaagtacaaatccacaggccactttaaatgcttgagcttttgtactgtaaattaaatcttttgcataaactctggtacggcgcagccacattccaagcacacacatacctgcaaaagtcattgcaaatttagcaacctcataaacccaatgtatagcagggctttcgatatgttgggtccctaaaagtctgagtacaacagcacagaatatcgatatacaaggcggagaagttaaaaccttttttaatatattgagcttactttgcggtgccgtagtaacggcagtcacagcccaagcattgccaaaaagcgacattccaatatataaagcaacaattggagcagttgcttcaggaccgaataaagccatagcaaaaggaaaaccaagccatcccatgttggtataacttacgcaaagtgccaataagcggtctttaaataaagccagataagcaaagaaaataatgaacgccgaaccaaaactaaagagcattaagctcaagcttcccgattgataaaagaccatgttgtaaataatcacaatcggaatcaggagtcgtgcaagccaagctgagagaataggttttacggtttctgaaatggaggtctgagcaagtagaagtcctgtgataaatgccaatacaggcagtaataatgccacgctctctcctctcgctcgtcaaaatcagcttgttatgctacaccttttgattttgaaatgtatgatctatttcaagtaaattcgtctaagaacgaagctcgataaaatttaaaaatcctcccaaaaaatatttttaaaaatctgatcgtaagtgtctacttataaatattgtcttaaaaatgaaatataaatgtcacattcctgtcatggcaacctgttgatataaagcgaactaaaaagaggtataaaatcatggctggtttatctatttggcatgtcgttattttcgcaattgtcgttattttattgttcggtacatctaagctaaaaaatatcggtaaagatgtaggcggtgcagtaagagattttaaaaagtcagttcgtgaagaagacgaagctgcatctttaaatagccctcgtacaattgatgcacaagttaaaacatctgaaagcacatcagtgaaaagctaaaggtttgacccatgcttgatgtaggaatgacagagttactctgttttgcaattattgcaattttagttttaggtccagagaagcttccggaagctgcacgctttgcaggtcgctggtatgttcgactaaaacgctatattacgaatctgcaaaacgagattgatcaggagctacgtctgtctgagttccgcaaagaaatgcaagaggaacttaaccgcattgaagcattggaacgtaaagtacaacaacagcttgaagaaatacaaaaacagcaggtttcagaatctttagaagcaactgaaacagctaaaacaacacaaaagcctattcggaaatgtactcctatatcgggccattacaaagtgccgtatctgactaaagttacgcctttggctcctcaaactgatatttcagaaacatctcctgttgaattgaagattgccgtatgaaccaactgccttcaaccgctgtaaatagtcaagaaaacctagaccaaatgccaatcatgaatcatttggtggttttaagacgtcatttatttaggattgtaggggtaacattattcttatttttttgtttactaccctttcgaaatcatacttatcaattattatctgagcctctaaggttacaacttcctgcctcatcttccatgattgcaacggatgttacagcaacatttatggcgccatttaaacttaatttatttgttgcgctcatgctggcaatgccatttattctttatgaaatatggtcttttgttcgtccagcgctttatcaaaaagagcgtcatttagcgctgccgttactgattggtagtattattttattttatgcaggtgtcgcttttgcttattacattaccctgcctgccatattacatttctttattagcgtttcacctgaaacagtagcaccaatgaccgacattaatagttatttaagcttctgcttaaagctatttttagtgtttggtgtcacttttgaaattcctatcgcgaccttgctactcattttgattggtgtggtaaatacgcaaagccttgctgaaaaaagacgttttattattgtaggatgcttctttgtagcgatgtttattaccccacccgatgcgatttcgatggtgatgctagcaattccaatgtggctacttttcgaaataggcttactcttcggcaaaattcttgagaaaagaaaaactcattctgctgaataaaaataatataaaaaatcctgaactaagaagttcaggattttttatgtagaacgctttttaatctacaaagcaataaactgtcttcaaagtgacttaaaaatgtaagaaaagtgtcattttcaatccatagaatcgactcaacaaatatacacacaaaagttacggatttattatgaccactgcttctaaccacccaacacgtcgcgatattttaaaatggtttacggggatcccttttcttccattaggtgcgatggctacggcagcaacgttagcaggttgtaacgatagcgataacgactcatctattgtcactccgtcaaagccaattaactttaagaatgcaacgttcacttcaatgccagctccttcaacggtagcagatattgccacaacagcatgtgcatcaaaacttgctatttcatgggaagacggcagcaaaacagaatatcaactcgcttacaaaccattcttcttaacaggtacagaagtgcctgatggtaaaggaggaaaagtcatcgcgggtggttattacgatattaataataagccaattattgataaatcagttgcaggtaaagaacgtcaattcttctctgactgcccagatggtagttctctcattagtttcaaacaagcaacaggcaaagatttcacagatgctgacaagaaagcattaggtgtaaccggtaacccagtgttccatgtggttcaatttgaatatctatcaaaagaccaaaatggtggtgatacttacggtaaattatcatctccgattgctgtcttaactttagatcaagatccaaagacaggtcacttaactttaattaaataccataacgttgatacttcaagtgcacatggactatggattacttgtggtgcaagtttatctccatggggaactcatctttctagtgaagaatacgaaccagatgcttttgatcaaaaattaggtcaatcactttcaacacttaaagccttcagtaaaaatatatatggcgatgaaaacattgccaatccatataactatggccacttgccagaaattaccgtaaatgcagatggtactggtcgcgttacaaagcactattgtttaggtcgtatttcacacgaacttgtacaggttttccctgataaccgcactgtgttaatgggcgatgactataccaacggcggcctatttatgttcgttgcagataaggagaaagatttatctgcaggtacactctacgttgcaaaatatacaacagtacttagtgatacaacgactggtcagatttcttggatcagacttggtcatgcaacaagtgccgagattgaaaacctcatcaagagcggcattaaaggaactgatatttttgagtcagttctacaaattgctaaatatccaagcgatgcaacaatagcagagaaagaggctattgatgcaggcgacaaaggtactcctgagcaacaagctttagccaaagctgcaaaagagcgtttaaaactacaacaagctgcccaaaaagcagaattagaagctcaaggttttaaatttacttatttaagtaaaactggcgtatatctcaagcttaaagataatagcgacagaactaaacttgcagcggctttccttgaaacacaccgttatgctgcttacatgggtgcttcaatggcattgaccaaaaacgaaggcacaacagtaaatattgcagataaaaaagcttattcagctttagctaatattgtcgattcaatggttgaaggtggtagcggttatcttgctgagcacaacgttaaattcccgaaaatcactgctggtggtattttggagcacacattaactggtggccagaaagacagctcaaatgttgcaatcaatagtgagtgggtacctagccaatctaaccttctcattaaaggtaaagatattagctttgacagcttagggaacaccgctgacccagagcaaattgctagccctgataacttgaagttctcagaaaaacttcgcactttatttatcggtgaagactctggtaaccacttaaataacttcttatgggcttataacgttgataccaaacagctcatccgtattttatctacaccggcaggtgctgaatcgacgggtctacatgcagtcgacgaggtaaacggttggacttacatcatgagtaacttccagcatccaggtgacgaatggaaccgtttctacaaagaaaaagatggtgttcgtactggtattagcgcagatttactcgctcaaattgatactgcaattaatacaaattacagtaataaatttgcagcagcagttggctatatcactgccgacccaattgcaccatctgttgtgaagaaataatttctttcaacactataaaagaggcctgctttatgcaggtttcttttatttttaaagtctcattaaaaaaataaaattccttcaacctttcactaaacggtcaaatatttcattaacttatcatcaaaacgtcaaagcctcgtcacattcacaaactaagctcatgaagacttttagaacaatctctttatttacttaggaatttcccatgacagagctgacgccatatcatgaagaccaagaattggataataatacttctgacaatatccactttcgtgacattttagaacaacacatcagtcgtcgtagtttaatcaccaaagcagcaagcggtgcagtagcactgactttagcttctactttaactggctgtaatgataacgatgatgactctggctctaataatggtggaaccacacctgtagatccaaataaaaaaccggaaaaactcacatttacgcccgtagctaaaaatttaaatgatattgtgactgtacctgaaggttatgaagctaatgtcatctacgctttaggtgactcaatcaatccaagagttggagattgggacgacaataatattccatctggcccaagcttccagtttcgctctggcgactgccatgacggcatgcattattttggcttaaacacatcaacaaaccgctttgacgagactgtgtcagcacaaggtttgttggtgatgaatcacgaatatattaatcagaccttccttcatcccaaaggtcctacaaaagtggatggacgtcgccctgaagatgaagtcattcgtgaaaccaatgcacatggggtttctgtaattcatattaaaaaagatccaaccactcaaaaagtagagattgttaaaaactctatttttaatcgtcgtattacagcttctacagttatggagtttgcaggtgctgcagcgggttcaagcctgcttgcaactcgcttctcacctgctggacgtcaaacacgtggcactcataataactgcggtaacggttatacaccttggggcacttatttaaccactgaagaaaactttattggttatttccaacgttcgggtagcgatgaatatgcacgtacagatgcagaaaaaattgcattaaaacgttatggtttaggcgttaaaaaagatgaaccttatctgtatgagaaagatgaaaaaggtgcacctaaaaaagataaagatggcaacatcatttacttaaaagataaaaatggtgagttaatccctaacgttgatgaacaagggcgacaaatttatttaggcacaagttcgcgttacggctgggaaacagcaattggtcaagtagagtcacaagacttgtatgatcgctggaatgccgatgtaaaagcagctcaagctacccaagattaccgaaatgggccaaatacatttggctggatggttgagattgatccatttgatggacgccaaaatccggttaaacgtacttcattaggccgtttcgcacatgaagacagtgcttgccgtgccgtagtaggtcaaccattagcattttatatgggtgatgactctcgtggtgaatacatctataaattcgtttcaaccgctgtgtgggacaccaaagatataaacggtggttatacagctggcgacaaatacatgaatgcaggcaaattgtatgttgctaagtttaataacgatggttcaggtcaatgggttgaacttgcttatggcaaaaatggcttaaatgaaagcaacactacctacccgtttaagtcacaggcagatgttgttacatttgcacgcttagcagcggattctgtaggtgcaacaaaaatggaccgcccagaatggtgtacggtcaacccagtaaacggtgaaatctatgtcacactcaccaataactcaaatcgtggtaaagactatgcaactgatgcagctaacccacgcaactatacagacctatatgcaggcacaaaagaacaaaaaggaaacgtaaacggtcatattatccgttttaaagaaactgatgataaaacgactgctgaaaccttcaagtgggatatttatctatttggcgcagaagcagcaatggcttcaaacatcaacttatccggcttaacagataacaatgatttttcatctccggatggtatgtggtttgacccacgcggtgttctctggattgaaaccgatgacggcgcttacactgatgttactaactgtatgatgcttgcagctctgccgggtcaaatcggtgatggtggtacagcaacaacttcaaatggacagcaaaccataacaggcgccaaagttacagacgcaactttgcgccgtttcttagtcggaccaaagcaatgtgaaattactggtattgccatgactcctgactacaaagcaattttcattaatgttcagcaccctggtgaagattcaccaagttacgcgaaaccagaaagtaactggcctgccacacaaaaagacccaagcaataaaactgcgcgcccacgctcagcaactgttgtgattacccgtaaagatggcggcgttattgctggttaattgatttacccagaaaaatgccgatcacttgatcggcattttttatttctatcgatttaagagaacctgttgctgcacaatttgaccactatgttcaccttgctgagtcttttccaaccatatccattcattattggtcattcttaaaaaattcgaacaccgtgttccatatacggggctttgaataaaagtcgatgacaataattcttccatttccggctgaatgcccgtgtttggcaacaatgctgtggtgaccttacgctcatcttctaaaatatcccacgctgcatgctgcaaacttaactcttctgttttgtgttgatgcataggcaggaactcttgcgtaaaacgtgtacgtaaatgtctggttttttcccagtgatcggacattaaaccattcgaaaccacatatacgccgttggctaatacttgaggagcctcaccgcggttactcatatagaccgcctgatcagcagttcccataaacaggttaaaaccagcaaagttctgttgctgttgttctaattgctgagcaaagcgaatcggtaacaaatcagactctaaaaaagcctgaaccaaatgaccacgagaggtctcatattgttttttatcacgtccatcacggaaattggttaacacagcccatcggccctgcggcgtaacacccatccaagtaccacccgactgtaagtcttgccctgcaatgattggtgtatgttcccattgatacaacaatgcggttggtcgatgataaaattcatcacgatttgaaatcagacacaagggcatatcgtccagaacatgccatgctaaagccacaatacacattgattcttgttccctatgtttacacattgaatgtacaacatttttcacatcattccgctacaatctgtcaaaacgtaagatcaaggagcagcaatgctgacctatcctaatatcgatccggtcgcaatacatctaggacctcttcaagtccattggtatggactcatgtatttattggcatttttatgtgcttgggggcttgcttcctaccgtgccaaacagcgtgatggctggacatcggacatggtttccgatctggtgttttacggcgccttaggtgttgtactcggcggacgtatcggctatgtgcttttctatgagtttgataaattccttgaaaacccaatttggttattccaagtctggacaggtggtatgagcttccacggcggcttcttaggcgtcatgatcgcaatgctattctggtgtaaaaaatatcaaaaaacatggttccagacactcgactttattgccccttgtgtaccgacaggcttaatgttcggacgtattggtaactttattggcggagagttatatggccgtgcggtcacagatccgaattatccattcggaatgattttcccaaccgatccattacatctggttcgtcacccttctcaaatctaccaagcgctttgcgaagggctattactctttattattttgtggtggtttagttcaaaaccacgcccacgtatggctgtatctgccctatttttaatgggttatggtgttgcacgctttgtgatggaattcttccgtcagccggatgccgaccaaggtttcatcttgtttggctggatgacgaaaggacaaatcctcaccgttccaatgctactgataggcctttggatgatgtggtatgcctaccaaaagaaaatttatgactggggccctcaaaagaacagttaacatctaaatcagaggagtttcggctcctcttttttatgctacagtttttatctcccaagaaagaagattcgccatgctggaattctggtttaatacgcaagtcccgacttttaaaaaattaatcattttaattattaccctcttaatctgtattgggttatatcaatatcaaccattacctttagataccattttaatgtttacaggaactggggttatttttttaatctgccgttactttaaattgcattttgctcaaagtaacccgactggtttactttaccgcctatttacgtgggttcctatcgctcttttatttgcacttatctttgtaaaaaccatgcctaacttgctgatatggggcgttcaaggaatcgcttttatggcgcttgctgcttttattttttcacctcaatctttatttaacaaataggctcatttttatgttggcttattggtataacgtaccgcgtcacatcaaactcatcttcattattgtcgtttgtgctgcaatttatgcagccaatcaagtccagcctttatcgccgacttacactgttcttagtctcgtgttagggtccgggcttcacttcgggcaatatttacaaacaaaaattccagagcacagttcacataaacttaagctccagtttctgcttagaatttaccctctcattattgttgctattataatgtggttactgccccctcaacacaattggattgcaacaatacaagctttaggctttgtactggttggattttttcttgtttcgatttatcaaaatcgggccaaacgtttttaaacagtaaatgtagctctctttcctacctatcgataagcatgctattatcttccacggtttattaatccatgaaccgtctccccttttattttatggaaattaatccgaactcgagagtgttatgcgtgcatatttagaccttctacaacatatccttgataatggcggtgacaaaggcgaccgtacaggcacaggaacccgttctgtatttggtcatcaaatgcgttttgatctctctaagggttttcctttactcaccacaaaaaaagttcactttcgttctatcgtgattgagttactttggttcttaaaaggcgatactaacgttaagtacttacaagacaataaagtcaccatttgggatgaatgggcaacagcagaacaaactgcccgtttcggccgcccagaacatgagcttggcccagtttatggccatcaatggcgtaatttcggcgcaactaaaaatgccgatggtacttataaccaagatggttttgaccaaattaaatggttaattaatgaaattaaaaccaacccaaattcacgccgtttaattgtctctggctggaacccaaatgaggctggacaagttgctttaccgccttgccatacgctcttccaattcttcgtacaagacaacaagttgtcatgccagctttatcaacgtagtgctgacgtattcttaggcgtgccatttaatattgccagctatgccctactcacccatatgattgctcaagtgtgtggcttaggtgttggtgattttgtttggacaggtggcgatacgcatctttatgccaaccattttgagcaggcaaaactacaattgacgcgtgagccattaccactttgccaattaaaacttaatccggatgttaaagatattttcgacttcaaatttgaagacatcgagattgtaggttacgagtcacatccggcaattaaagcaccagttgcagtataacgacggcttaaatttcattagattacggtttagagaataagattatggcatggcaaaatgtaaaagttgtccacgttgtcgcaatggacaaaaatcactgtattggtaaaggcaatgcgttgccatggcatatctctgccgacttaaaacactttaaagaaatcacacaaggtggtgtggtgatcatgggccgcaaaacgcttgagtctatgggccgtgctctaccgaaccgtgtgaactgggtaattacccgtgacattaactggcattttgacggcgtaaaaattgcgtattcaattgaagatgctttaaatgctgctttagaagatgccaaaaacaccgaaaagcaagctttattcattattggtggtggtgaaatctttaagcaaaccttgtcaattgcagaccgtcttgagctcactcatgttgacttagatgtacaaggtgatgcacattatccaacaataccgagtgaatttcacaaaactgcaagcgaacagcaagtagatgaaaaatcaggaacttcattcgaatttgccacttataaaaaataattttctggtcgcctatgcacaatatcggaacacgtgaatttattatcgccctcctcttcggcgctttacatagtttattcacgttgtttattgtgctttccagcatttgggtatgcttagccctatgggtccaacaaccttttggctggttaggcagccgtattattattggcatatggattgcctttgctttaagtatggcgggtttatattttaatgggcatatcattagccgtcgtacagacgttttaatctacctgttagcttttgcctgctctttggtttggtacttttcgattactgcacgtcaagaccgtgactggaaccctgaggttgccaatatgctaagttacgaaaaacacggcgatgttattactttgcataatgtccgtaacttcaactggcatcctgatggaacctatgatgttcgctgggaaacccgtacttttgacctgaaccagttaaatggcataaatattattacttcttactggatggggccacaaattgcccatacgctagtcagtttcgaatttaaaaatcaacaacctttagttttttcgatcgaaattcgaaaagaaaagactgaagagttttcagcaattggcggcttctttagaaaatatgaactgagcttaattgcatctgatgaaaaagatattgtctacacgcgtagcaatatccgtaaagagcaagtttataatttcccggtcaatatgcctcgctctgagcaaaaagcgctctttttagaatatcttaaaaaagcagatgaactacgtgcagaaccaaagtggtacaatacgctcacaagtaattgtacaactttaatttttgatatggttcaagccattaacccatatcagcttcctaaagattatcggttaattgcctctggttacttgcctaattatttatatgatcttaaagcactcgatcaaaatattagcttgaaacagtggtaccaaattgcacacattaacccacgtactgaacatttcgaacaatttgcagaccaaagcagtgagcatttctctcaaattgttcgacagggtttacctaaagtaaaatgaaataagtaatgcaattttctttacttttttatacacgctttactttgtaatctaactagataaaccctattgtaataggcaggaaatagaggaaaaaacaatgcaacaggcattatttggcggcggctgtttttggtgcgtcgaagccgtatttttacaaatacgtggtgtagaaaaagtaacaagtggttatgctggtgggcatacaactcacccaacttatgagcaagtatgtcaaggtgacactcagcatgctgaagtggttcttatcgactttgatgaacaacaagttacatattctcagttacttgatgtgttctttgcaacgcatgatccaacgactttaaaccgccaaggtaatgatattggtactcaatatcgctctgttatttactattttaatgaagagcaaaagcaggcagcggaacacaccattcagacattaaaagatgatgatcttgatattgtgactgaattatcccctgctcctacattctatccagcagaagactatcatcaaaattactatgaaaagaacccttcacaaggttactgtaactttgcaattccacctaagctgttaaagttacatagtaaattccaacatctcatgaaaaattaataaatgagaaaataaaaaagcaaccgaattggttgcttttttattacgtgaaactagattttagttttcacttacaaaggcaatatcgctcagtccggcttcactggcgcgagacattacctgagcaacagtatcgtacttcgactctttatcagcgcgaagttgaactgtcggtttaaccgcaccttgacctgcttcttggaaacgtttttgaagctcatcaaggctaattacttgagtatcccaagccacttcaccatttgcattgatactaatcgtaattgcttttggtggtggatcaataatttcagcagttgttttaggaagcgttaatggaatcgatgggttggcaactgttgctgtgaccaaaaagatgatcattaacaccaacataatgtcgattagcggaatgagattcatctcattcatgccactatcgtggtcttcacccaattgaaaagccattaagcttgacctccaacataactttgctgtgcagttttaacatcagactttacagttgagtcttgctgcaacatggtgtcgattaacaaactgtgtgcttgatcttgtaaatcatgagcaaggccacgattcgcacgtacacagatgttataagccaataccgctggaatcgcaactgcaagaccaagaccagtcataataagtgcttcacctactggtgtagccacttgagctaaacctgcctgtccgctcttaccaacggcaactaacgcgtggaaaataccccatactgtaccaaacaaaccaacgaatggtgcaattgaagcaattgttcctaaaactgaaatacctttatcagcattggctttctcagcagaaatctgacgcaataatgcttgctctgcaactgctttacgttgttcaaaactcaaaggttgtaactttgctttgagcgaagtaatagcctgagagagttgagcataagcttgttgttttagttggcgagtccccatcaaacgtaagatgaaaactgtccaggtagcaatcgacattgccaataagatgaaatacagggttttactcactgcatctgcatgttgccaatagattgaaaagttcatattcgaactcctgattaaggttagccgttgggactcaaattcatttaaggggttaagtcaaacggttgctctgctttaattggataagcaacaccgttttccatataaggtttaaattttgcactacgtacagcacggactaccttgtcatctagacttggaataccgctgctacgggttacgcgcacgttagtaatcttgcctttctcatcggcttcaataagtacaacaaccgagcgtgcttcgccctgtaaatcttttggtgaaacagtcaaacgtggtgagcggctccactgtacacccgaaccaccaattgaaacgcgttttggcgatggatctggagcaggttgagctttaggtgcttcttgaaccactggctttggcttttcaacgactttttcagtcacagtagtcgttggcgttactattttcggttcaactttaggttctgtttttactgtttctttaggtgtttcagcctttttgacctgctgaattttttccacttttttaggtggagttacaggtttctcgacaactttaacctctttcacttcttttttaggttccggctttttaggcggttcttttggttttggtggtaaaggttttggttgctcttgaatttttacaaagcggacttgtaaaggtttcttttcaattggctttagttcagcaggcttaatgtggctgactgcccataagaccccgatatgaccaattgcaaccgcaattagtgccgtgatgactttctttttcatcggattgggagagtttaaggctgcggaagattgactcataagaatctaattacctaatggatgatgatttcggttttcaatttatagaaacgatttcaaacatcggatagaacaataaagtgccacaataataaatgagaagtgttttcatttgcaactacttttttatgaaaacattcctcattatcgcgaggtctaacttgataaagtgatatcaccttagttttctcatgcttagacaacgcactaaaatttgtaagttccctatttttacttatcagatcgcgctcagcttaaaaaataattaagtagctagatattaaaagtattctatagagcaacagactttagttatgttataacattttaaatttattttagccataaaaaaagcacgctcaaaagcatgcttttaaaggaatataagttgttagaaaacaacagtcttattgccatctacaataattcggtcttctaaatgccatttaacagcacgagctaatacattacgttcaacatcttcgccaagctcacgtaactgctcaacattataatcatggctcacacgttcaacgtcttgctcaataattgggccttggtctaagtcagcagtcacatagtgagctgttgcaccaatcaactttacacctttttcatatgcttgcttgtatgggtttgcgcccacaaaagcaggtaagaatgagtggtgaatattgataattttcatttcccatttagaaacgaaatcttcacttaaaatctgcatgtaacgcgctagaactaacaagtcattgccttgcatcatttcatgaatttgagcataagcttctgctttattgtctttagttactttaatgactgtaaatggaataccaaagttttcaaccgcttcacgtaaatcttcgtggttagaaattacgtgggtaatttcacacggtaaagaaccacgtgcatgacgccacaatagctcaagcaaagcatggtcaactttagaaactaaaataccaacctttttaatatcattaacaaaagcaagacgccattgcatgccataacgttccgctacatttgctgcgaaagtctgaattaaagcatctttacgagactgtaaatgatcaagttcaaattcaacacgcatgaaataacgtccgccttgagcttccgtcgcatactgatcaagcgcggtaatgtttgcaccctgatggtacaaaaagctcgatacagcctgtacgatcccaggcttgtcttcacaagtaatcagtaaacgggctgtattggcagtggtcatattcatttggttaatatcacttaattgagacaaaattttgataagccgagtattctagcgctctaaataaacaagcacaactattcatcttttagggacgataagctggcaaaaagatccgaaggtccaagcgactccaataattgctcataagtcgcgcggctttcccccattaaataagggccttctaaaaaaaccatttgacgtaaagcttgccaaacccatttttcttcaaggtggttattgtcactaatgtgtccggacatatatagaaagttggtccagttggttaagacaatccagaggttaataatgagcgcttcaatttccgatggcgtcattttcataagcccggcatcaacaaaggcctgataaattctttggccttgctgcatgacctgccctgcaaaccgaggatagatctttttaaagtcttcgttactttcaactaaatgataaacatcacggtgaataaaacgatagttccatagctgaccactgagtacctgaaaataattaattttgtcattggtcgttaatggtctgtcctcaggtaaagagagcatttctaaagtctcaacctgatattggtgcattaattccttaatgatttcatgcttgtttcgaaagtggtaatacaagtttccaggactaatccccaactctgcagcaatatgattggtagtgacagaccgttcgccacgctcattaaaaagctgcaaactgatttgtaaaatccggtcttttgtcttcagagctttaggtagagacattttaataaccttcgttaattcatatggttaagacttgcacacagaaaccaacttgactctttagagtatttactctaaaaaataagtatatcagtatatttggtaagtaccgatgaacagtcaaacaaaaacaaatccagagactcaggttccttatgatgttaagcatttacatgatttgcttgagcagcaaaagattgcctacttacgtcatccggtacccactgctaaagagcgtattgatcgtttagctcgtcttaaaagagtcttggtaaaatatcaagatcagattgccgaagcaattaaccttgattatggcaatcgtgccattatggaaaccaaaattggtgagttacttacctgtcttgaacaaatcaagtattacagtaagaacgtgaccggatggatgaaaccatcaaaacgccatatcagtgtattacatcagccagcaaaaggttgggtacaatatcaaccaatgggtgttattggcattattacaccttggaactatccattactactttccgttggcccactcatctgtgctttggcggctggtaaccatgccatgatcaaaatttcgagtgcttctccaaattttggacaggttcttgaaaatgctctttctgaagcttttccacaagaattggttgctgtggttaatggcggtggtgtgatctctgatgcgtttagtcacctgccttttgacaaaatgattttcacaggctcgacttctgttggtaaaacagtcatggcggctgcagctcaaaaccttgtgccagtcattcttgagttgggtggtaaatcccctgcgcttgtacatgcttccgtagacatgaaagatgtcgcacagcgtattgctgtgggtaaattatggaatgcaggccaaacttgcgttgcgccagaccatattttcttgccgcgtggtaaaactgccgagttcattgaaaactttaaattgattgtggctggaatgtatcctcatttccgtaacaatcaagactacacatctattattaatgataagcagtacaaccgtattcagggctatctagaaaatgcccgtgatcagggtgctcgtattattgaaattaatcctcaaaatgaaattttagatgatgtccgcaaaattgcaccgactctggttactggtgtaacaactgcaatggatattatgcaaaatgaaatttttggtcctgttctaccaattttagaatatgaccaaatcgaagaagtcatcgaatttattaatagtcgaccacgtcctttggcgatgtattattttgactatgatcaggcacgcgccgattatatctctcagcatactcattcagggcatttcggaattaacatggtgattacccatgtagcacaagatgatttaccttttggcggtattggtgcgtcaggtatgggtaaatatcacggaccggagggcttttttgggctttcgcatgaacgttcggtcatgtcaaatccaaaactttatagcttgaaatatattcttccaccgttcaataaaccgattcatcgcttcatttcgaaaaccttgttgcgttaactgatcaaggcatgatctgttatactagatcatgcctcgtttttaccaatttcgcttgtcttttaatcgtatttttggtataaaacgccccttgaatgaattcatccgtttacatttagtatgactggccacagatttgctgttggctaaatcaatggagttacaccatgtctaaggtttgccaagttaccggcaagcgtccagtcgttggtaacaacgtctcacacgccaacaacaaaaccaagcgccggttcgagccgaacctgcaccaccaccgtttctggttagaaagcgaaaaacgttttgtacgtcttcgtttaaccactaaaggtatgcgtattattgacaaattgggtatcgaaaaggttgttgcagaccttcgtgctcaaggtcaaaagatctaaggagtctgagcaatgcgtgataagattcgcctcgtttcttcagctggtacaggttacttctataccacgactaaaaacaaacgtactatgccggaaaaaatggaaatcaaaaaatttgatccaaaaatccgtcaacacgtgattttcaaagaagctaaaatcaaataattttagcctcgaaaaaaacgacttctttatgaagtcgtttttttttgcattttttttatacctgcctttttgttaaactttccacatattccgccttggcattttttatgcttgtctttagcctaactcacgtaaaaggagtttttagtgccgcatgacgtagatttaattattttacttgctgttggtttcggcgttgccctgttttttggctatattgccgcccgactacgacttccccctcttattggctatctcattgccggaattattattagtcctaatactcctggtgttgaagcagatattcatcttgcaaaccaacttgctgaactcggtgtaatgttcctcatgtttggcgttggtatgcatttttccttaaatgatcttttacttgttcgccgcattgccttgccaggtgcaatcttacaaattgctgttgcaactttactgggtattggcgtttcaatgttatggggctggagctttggctccgcactcgtttttggcttaagcctgtcatgtgcgagtacagttgtattattaaaagctttaggagaccgtggccttctagattctgtaaacggcaaaattgctgtgggctggctgttagttgaagatttagtcatggtacttgttttagtacttcttccagctacagctgttttactcggcggaaaagctccagcaggcgcagaaggtaacatctggctaactcttggaatcaccctattaaaggttattggctttatcgcctttatgctgattgtcggtaagcgcgttgtgcctattattatgcagtttgttgctcgcttaggttcaagagagctatttacgcttactgtagtcgctgctgctgtatcgattgcctatggttcttatgccatctttggagtttcaatggcattaggggcattctttgctggaatggtcgttaaagaatcagattttagccatcgcgcagaagaagaaacgctaccattacgtgaaattttctcgattttatttttcgtttcagtaggaatgttgtttgatccacatatccttattgaacgtccactacatatcttggctgttatcgcgattattatggtgggtaaaacacttgctgcaatggccttggttttattcttccgttatccaatcaatactgctttaacagtcggggccagccttgctcaaattggtgagttttcatttattttggctacccttggtgtctctttaggtctattaactttagaagctcaaaacctgattttagcaggcgcattattctcaattacactgaactctttcatcttctcggcaattgagccggtacaacgttggattcgtgaacgctctcatttagcacgacttcttgaacgtagtggtgacccattagccatgctgcccgatgaagtcgatcaatcttatctacgcgatcaagtggtgattgtagggtatggtggcgttggacgacgtattactgaaaatttaattaatcaaaatattaaagtcgtaattgcagaagagaatcgtgaaatcgtagaaaaactacgtcaggcaaatattgcagctgtaagtggtgtagcaaccgaacctggcgttttaattcaagcacatatcatgcacgcacgactcttggtaatttcacctatggatattttagatattcatcggattgtagatattgcgaagcaattgaaccctcaaattcaggttttaatttgtgcagaaagtaaagaagaagccgcagtgattagagacgaacacattggtgaagtattctatgcgaaagaagaaatggctaagaatatgagccatcatattttaaatcaaatcgaacttgcgcatcagtccacacatcattaatgcatacaaaaaaagcgtactcaagagtacgctttttttaacttaagaatttaggctgctcatccacaacttcagcctgccattcattgacctgcttttctaacagcccaaacaaagcagcttgaatcatatgttgtgcaactataggcgtctgttcacctaatattgcttttagttcatcactaaactgaattttaaccaagggctctttttcagaaccagcattacgcaaggcgagctcaccaccttctagttggaccaattccaacactgcttcttgatttccaaataactctttcaattgctgtatagacatatacttcctccatgtttcaacatggtggcaaagcacccttgcactttgcatctctcgtcttatttatataggcgcactgggattaaatttcaagcgctcagatagtttaattttagaactcgaccatttcgttacgaaaaccatcaattaaatgacttaactctctatgccattcacgcaaaattttcacatcaggtaaccatgattgtggtccctgagtcactttaatgatcaaattagaagaagtttcttcttccggtgtcggttcagttggttccggtgcatattggcacatacggtaagcacgttttaattctgcaacgaagccatcttttgccaattgctgcaaaacagaaacttccggagaaacttgtccttttgccgccatatgctcttcaatagattttaatgtcggttgcaagtcatttaaacggtaataacgtaccaattcttgcaaaaatgccaacatcgcaccatgtaaatgaaatacagctgcttcacgatacgcttgtacctgctgtacatgatcagtttgctctgcttgttgacacgctaagcgtgcaaaatagagtttttgattggtacgatcggcatgataacgagcaacacgtgacataactaaactttcctgttctaaaattgccatctatatggctattcttagcttaacgactccattgataaaatcaacgttatttatggtaaatccagagagacttgataaattttacgttatccctcatcaccatcattctttaaaaaattttggttctcaacaatgaatagatctttaagaggcagctgtgcagggacccatgaacgaacttcaagtgtttttattctctgagctatacgtgttccatttggagcaaccacagaaagagctaaaaattgttgcataaaagccttactcttcagctgccttaacccgaataccgtaaccttttactttaagtgtatttagacctttaattgctttaatggcttcacgcggattcggcatttcgacaaagccaaagccctttgatttacccgtatctttatcggttacaacgacacaagactcaactttaccataagctttaaacagctctaaaacttcagcttcagtcactgaacgatctaaattacgaactaatattttcattttccaaccttcattgaccatcaaaagaaaggccaatatacatttgagtattcacagtgtcttatacagtaatttagtcaagatcgataccaaaacctaagtttactgttcgtgaagtattccattgttttttggcaaatggctgtggtacctgacgatgaattttggcctgaaccaaatgggcaggtaaatcatttagaaaatagctttcgattttgcggccttgttcgtcatacgtgtcttgtgaccatgtattgagattttgcttcgtcaaaatcaattcattttccgcacgtgttaatgcaacatacaatactctgcgctcttcttcgacttcatcaaaatcgccctgtgcacgcgcatagggatattggtttggtgagacatgtggcacataacacactttctgttctgcacctttagcggagtgaattgtaattaaggtcactaaatcatcatcacccgctttttcaatttcagaaattgaaattggttcaagcacatattcttcaagaaactcaccaagagatgcatgcttacgcgcaagttgtttaactaggtcgaaatccctagcacgacgtgaccagtctttagttttatagttttgctctaactgttcacttaatgcatctagtgctagaccaatgcttgcctcaacatgctgctgtagcacatcaagctgtttcaaaatcaaaatggcctgcaaaggaacttttccatgacgctccaaacgctcacaacgctcttcgacctcactaatgctcattaactcttgcgctaacttgctggcacccacatctccaataccatcccataaggttaaaaagcgcatccaagccaagtcatcctgtgggttactcacaatacgtaataaactgagcacatcctttacatgcgctgattcaagtaactttacgccaccaataaaacgatacggaatttcagcggcaataaatgctccttccaaatagcgtgcgctatagcctgagcggactaacaccatatggtcgtaccaatttgcaccctgttggtgtcgctctattaagtcttgtgcaatccagttggcttcttcaaattcattaccaaacaaatggagttgtggcttttgtcctttgccacgatgagcctgtaactgtttttgataatcgattggactgtgagcgagtaaccaatttgataaatctaatatttcttgagtcgaccggtaatttaaatctaaagtatgaatcactgcatctggaatacgttctttaaaagaatgaatgttttcaaaatcggccccacggaaaccgtaaatcgactgggcgtcatctcccacacaaaataatttcaccttaccaatcagtggctgcaaaagtgcccactgtaaagggttggtatcttgcatctcatcaactaacaaagcttggcagaaaccagcaacccagttcgtcagtgcttccgagttttgtaaatgaacagcgacgatcgacaaaatgtcatcatagtctaaaaaattacgctctcttttacgctgttcataggttttcattaactcagcaatttgtgatttatattcatatgcttcaggtaattgcttgagtaacgcttcagaaagcttagattgcgtatttcgggcataagaatataaatcacatagctctgccgctttaggcaaaacattatctttgtctttgcctctcaataagcgaaacatgagtaactgatcatcacgatcaataatactaaattgggttaaaccaaacgcttgcggattacgacgcaataaatacatgcaaaaggtgtgaaaagtggatgcacgaagacctttggcttgtgccccaacatgctgttcaacccttgccacaatttcactcgcagcacggcgggtgaacgttaaaatctgaatttgatttgcaggtaaaccttgatcaattaaataagctgcgcgagcaacaatagttttcgtcttgccgcaacccgctccagccaaaaccagacagttttgagccatagtcgtcgctgcttttttttgctgagcatttaattcattaattaactttgcaagactcataacacatatcgctaaaacaccaaggcttagtttaacagacccatgccatgagatggaccttcgctcactaaaaacaaaaaagagcaccctaagtgcccttttgttcgttatttattttaagaaactgtttttgagctagaaggtaaatgcttaatcgcagaagcgagtcctaaaaagttaataccctgaaataaaatatctactgccaaaaacattcctaacacccaaaacggagaatctttagaaactaaaattaaaatacctgtagcgagggttaataatcctgaaaataaggtccagccccaccctgcaattggtcttagtaaaaatgcatttatagtgcggattacacccgcaataatcagagcaattgataataagcttgttaaaaccacagccgtagtaacaggcgtagaaaatgcataatagcctgccattaaatacagcactccaaaaagtgcccacagccatcggctaccgcctttaaatacacttaaggcagcaattaaatgcagtacaccgcccaccatcattaaaataccaaacagaaaaacaaccgaaaatgtggcaaatggcagtgagctaaataacaccaaaccaaaaataatgagcacaaagcctaatattagataccatttacgatcagcatgtagctgattacgaaccaaatcattacctacagttttcatgacggcgactcttattatcaggtattaggaagtttatataatgtcattatagtgatgcacttcacatttattgtctgtataagatgtgcatcgtttattaacaattgatgtggataaaacagtatttatccacaattttatttcagccaccccacttcttgggctgttggtaaacctatgacggtttcttgtaaatcacttggcattttgctggtctgctcagataatggtgttcgaccacccatgatttctgctcgcttttgtggataaaggggtactttttcaggttgtgcatatcctaatggatatatgggctgacctgtttttaaatcatatttatcttttgccccaaagccatgtaatagctcatgaacaattacaacctgattttgtgatgcttgcccacgtgtagcaaacaaattaacactaccaatacggcctttttctaaagcagtcgaatgcaccaaaactttttgataattgggatcgtaataatttaaataaagtttgagcgatgctccattatcttcaggctgttgttgtcgccatgcataaaaacgaaactttaaactccaccaaaccacatgaaaaataccagcattttgtggcacctcaggcggacgctgctgtaactgttgccccaagcgtatttcaaagtttgctgattggccccgataatgttgcgaccattcacttaaatagcttttaagcgcctggaaatcagtgttttgtaactgatgaatataagtttgtgtggtttgtaagccatctgcatttattgggtgtaataccaccacaataggctgattccagtcttggttttggtcacgccacgcttgaactgcaacgattaataaaacaattaatagacataaaatccgaatgtttttccacattctttttccccataaaaattaaaattttcttttattgttgtagatgtaaaaaatgctagctgagctagcattttttacctatcttatttagccttcaatccatttaccgtcttgataaattaggctccatttggtttgtttaccttctggtgtttcagaacccacatattgtgattggttcttacgactaaacttcacaatggttgggttaccttcagggtctacatctggagcttgtaaaataaactggtattttggatcaagttgatcagctacgctacgaagctcagcaacttttggtgcacgtgtttcacgaattttcgggaacttacttgcagccaagaacagaccagccgcgccatcacgtaacacaaaataatcatcatgcttggttgaacgcaagtgttccatcttgattggttctacacgtggtggtgcaggttgaccatttttcaagactttacgagtattgtcacagcttgtacaagcgaaatatgggccgaagcgaccagtcttaagctgcatttcaccatcacatttatcacaaggaatggttgggccatcataacctttgatcttgaactcgccttcttcaagctcatagccatcgcaatccgggttgttaccacaaacatgtaacttacggccaccatcaatgacgtagctgtccattgccgtgccacatttcggacaacgatgttttgacatcaagtctgctgtttcagcactatcgtcatcagataacgctgctagagactcaactggcgttaagttcaaggtccctttacagcgttccttaggcggcaagttatagccagaacaccctaagaatacgcctgtagtgcccgtacgaatctgcattggacgtgaacattcagggcaatgtactgctggtacttcaactggctggttacgacgcattccctgctcaccttgagcattggtcaaacgctttttaaaatcaccatagaatgtgtctagcaattccttccagttacgctcacccgttgctacacggtccaactgaccttcaaggtctgctgtaaatgcatagttcatcaggttattaaaactttcatcaagacgatccgttacgatctcacccattttctcggcaaagagacggcgattttctaacttaacgtaaccacgttcttgaatagtagaaataatggcagcataagtcgacggacgaccaataccacgtttttcaagttcttttactaaagatgcttcagtaaaacgagctggtggtttggtaaaatgctgacttggatctagcttttctagctttaaaatttcacccactttaattgcaggtaaaatgatatcgtcatcagatttgttggcaccacgaactttagtaaagccatcaaatacaagcgtacggccttttgcctttaactcaacattgccagcttcaactgttaaagttgaagataaatattctgccggagtcatttggcaagctacgaactgacgccaaattaaatcatacaaacgctgagcatcacgctctacaccagcaagttgatcaccagtcagcgcaacatttgatggacgaatagcttcgtgggcttcttgagcacctgctttattaccatagcgatttggcttagctggtaaatatttttcgccatattggctttcaatatgcgcacgtaccatacttacagcatcatcactcaaaaacgttgagtcagtacgcatataagtaatgaaaccagcttcatacaagcgctgcgccaacatcatggttttctttacagagaaacctaaacgtgtacttgcagcttgttgcaaagtcgacgtgatgtatggggcgcttggattcaccttagttggtttatcttcacgctgggcaactttatattcagcaccttttaatacatctaacagggcatctgtttcagctttattttttaatttaagtgttttacccgcctgtttaacagcctcaagacgaatgtcatcttttttagctttagtgtctgcaaagacttgccaatattcttctggaataaaagcacgaatttcacgttcacgttcaacaacaagctttaccgctacagactgtacacgacctgccgataaaccacgggcaatcttttcccataataatggcgaaaccatgaagcctactacacggtccaagaaacgacgtgcttgttgtgcattaacacggtttaagtcgagacgtgttggctgtttaaatgcttcttgaatggcatttttggtaatttcgttaaataccacacgatgataacggctatcgtcaccaccaatcacttcgcgtaagtgccaagcgattgcttccccttctctatccaagtccgttgcgagatagattgcatctgcatctttagcaagtttctttagttcagcaacaacattttctttgccaggcagaacttcgtaatgcgcttgccatccatgttccggatcgacgcccatacgattgattaaagcctgattcgctttttgttctttttcagcctcagtgagtttggtccgggcagccggctttttctctgttgctttactgccgcctgttggcaagtcacgtacgtgacctacagaagacttaacaatgtactgcgaacctaaatatttgttgatggttttcgctttggcaggcgactccacaatcactaaggcacgtttatgtgcagcagaggcagaagatgctgtgctttgagatgcagagcgcgaggtattcgccatataaaatgttattcctataccaataaatttaaaaatcaggcttcagccaaggccaacagataagccttcatctcatctaattgcgtagctttcaggtccgattcctcatcccaataaaggcctacacagtttgcctgcatatcaatagcataaatcccttttaatgcaatgggagaatcattaaatttctcatcgccttgcacaacttttaattttccgtctataacgcgagcacgcatgagcggtaaacgagcatcggggatcaatacactatagtaagcaaccatgctggcacgcttttcagttgccatcgggacatgtgtccattcaggtgcagcaattacgcgtggatgtagccccattttgcgggctttgtctcgcataattcccagcgccttttcacgtggactcactcttaaaccaaaaatggagcctagcacgaaaagaacaatgataacggtaacccaaattccgatattgtccatagcaaaacctattaatctcttttattagagttgcataagctgaccagaaaacgcaagttacatcataaaaataatgtccaattaaccgacaaggctaaaaactacaacatttcctcatagatatttttaacaatcgaggcagaatatttaggcgctcttttcagtttcaagagtagttaacttaccaaactgatccagatgcgcatctccccacgtttttaaagcaagaagtatctgctcaagcccgcgccctaaatcagttagacaatattccactttaggaggcacttgaggataaacctcacgatgaataatgccatcttgttctaattcccgaagctgattggtcagcattctttgtgtaatgcttggaactcgtttacgaatttcattaaatcgtaaagttccttcatttaataaatgccaaagaatgacacatttccatttgccatcaatcaaactgattgcggcctcaactgaacaacctggtgagcagtcaaaacttgaatgtcgagcttttgccattttacagtatcctttttgacactatgagcgttatttgtctgtagtcactatttttaagcttacgttatgatcaaactctcaacaagaggaatgatgattatgaaagctgtggcatatcaaaaagcggggcctattacatccccagaggcactcgtagatattgaaatcgacactccagtagctaaaggacatgatttacttgttcgtgttcaagctgtatcagtaaatccagtcgataccaaaatacgtaaaaatgtaagtgctgaacaatctggttggaaagtacttggatgggatgctgtaggcacggtagaagcgattggcgataaagttactcaatttaaaattggtgatgtggtttggtatgcaggtgctttaaatcgccaaggcagtaatagtgaattgcaattagttgatgaacgtattgtcgggcataaaccaaagactttagaagtgactgaggctgcggccctccctttaacggcaatcacagcttgggaaatgttatttgatcgtctacaagttccaaagactgcgcctactaatacgactattttagtgattggtggagctggtggggtaggttcaattaccattcagcttcttaagcaattaactaacctcacgattattgctacagcttcacgccccgaaacaaaagaatgggtagaacaactaggtgctgactatgtattagaccaccgtcagcctttagctgcacaaattaaacaattaggtttaagtgcacctttatatgtattctcaaccactgaaacagatcaacatttatcagatattgtagagttaattgctccacaaggtcattttggacttattgatgaccctgatcagttagatattaaaccgtttaaatctaagtctgtctcagtacactgggaatttatgtttacgcgctccatgttccagactgaagatatggaaaaacaaagtgagctactaaatgaagtcagtaaactggtggatgaaggtaaaatcaaaacaactgtgactcaggttttaagcccaattaatgctgaaaacttaacacgggttcatgagcaaattgaaagtggttcaaccaaagggaaaatcgttttacacggattttaagttgcacttttgaaaataaatggcaagcgtaacgcttgccattttaattagtaatgcggtggtttattcgttaatggatcaaaaggtgcaacaccttctgataaatctgcagattccacacgttgataaagtaattgcatttgtttttttaaatcagctatttctaaagtttgaatcgcgagttgctgatttaattcctcaactaaatcatctaaaaatgcaattcgcacttgcaaatcttcaatgggtgcggaaaatgacgcttgatcatcatgatatggtggtttagtcatttaagtcctcatttgagattttggaaaacattatggcctatattactttaagggatgtccaacttgcttttggcggacctgccctgctcgatggcgcgaacttcaacctagaacgtggcgaacgagtctgtttaattggtcgtaatggtgaaggtaagtctactttacttaaactcattgagggaagcctactaccggattctggtgaagtttctgtccaaaatggtttaactgtttctatgttagcccaagatgttccaatgtcatcgggcaaagttgcagatattgtagcagaaggtgcaggagaagccgctgccgtgcttaaagcctatcatgaagcaagtgatgcctgtgtacttggtgacatggaagcttgcgatcgtatgggatctttacagcataaacttgaccaacttgatggatgggcattagaaaataaggtcaacacgattttaggtaaaatggagttagatccgaatgcagatctagccgacctatcgggtggtcgtaaacgtcgtgttttacttgcccgcgccctacttactcaaccagatgtgttattactcgatgagccaactaaccacttagatgttgaaagtattgagtggcttgagaaattcctgcttgatcaaaataatttaaccttactctttatttcgcatgaccgttcttttgtagaccgccttgcaactcgtattgtggaattggatcgcggcatattacgcagctatgaaggtaactattctcgttatcttgacctaaaagctcagcagcttgaagctgaagaaaaacaaaatgccttgtttgaaaagaaacttgccgaagaagaagcatggattcgtcaaggtattaaagcacgtcgtacacgtaatgaaggtcgtgttcgtgcccttaaagcattacgagaagagtcaaaagcccgccgtttccaacaaagcaaagtcaatatgggcgttcaagaagcacagcgctcaggcaaacttgtatttgatattgaacatttaagcgtaagttacgatggacaaaccctcattagagatttctctgccattgttatgcgcggtgaccgcattggtttggtcggtgataacggcgtaggaaagactactttaattaaagcgatcttaggcgaagttcagcacgaaggtgttgtcaaaacaggaactcagcttgaaattgcttacttcgaccaattacgtaatcagcttgatcttgaaaagtcggtttctgaaaacgtttctgaaggttcagatttcgttgatgtaaatggtcaacgtcgccatattctcagttacttacaagacttcctattctctccggaacgagctcgtacaccggtgaaagcactttctggtggtgagcgtaatcgtgtcctgttagcaaaactgttgcttaagccatcgaacctgattgtaatggatgagccaacgaatgacttagatatggtcacacttgagctacttgaggagatgttgtctgaatataaaggtactttgcttctaattagccatgaccgtgcttttatggacaacgttgtgacatcaacttgggtatttgatggcaaaggcggtattgcagaatatatcggtggttatcaggactatttaattcagcgtccaaatgagagagtcgttgaccaaaaaggcgatgtaaaaaaagctcaggctaaagcagaagctgaaaaaaatgcagctcaaacgaacgtaaaaaaggtcaaattaagctacaaagatcaacgtgaacttgagcaattaccggcagaaattgaaaagttagaaaatgagcaagctgaactttctgacaaacttgctgacggctcctggttcgtaacggatgccgatgcagcaaccaaagcaagccagcgtctagcagaaattgaagagttactccttgaaaagttagagcgctgggatgaacttgagcaaatgggtaaagggaattaattaattttttacctgctgattaatttaaaaagcctcctagattagggggcttttttaaatataatttaagatattttttcaaataagatttataaaaataattatgttatacctatcagtataataatatttaaggatatttccatgctagatctctctcaaattttggcatttggattcatttgtctggcgatggtactcacccctggcccaaacatgatttatcttatctctcgttccattagtcagggcaaaatcgcaggatttatttctctcggtggcgttgccgttggttttgtattttacatgctctgcgcatcttttgggattacagcacttgttgttgcagtaccttatgcatatgacactattcgtattgccggtgcaatgtacttactttggttagcatggaaagctttacgtcccaatgccgcacctatttttaatattaaagatttggcggttgactcaccattaaagttatttttaatgggctttttgactaatttacttaatcctaaaattgcgattatgtatttatctttattacctcagtttattcacccacaacaaggcagtattttagcgcagtctatccaactcgggactatacaaatttttgtaagcgtttcagtaaatgcgctgattgtattttctgctggtagcattgctctttttctacagaaaaaaccactttgggccagcattcaacgctgggtcatgggaacagtattagccggtcttgcggttcgtattcttctagaacaccgtcgataacccgctttatttttctttatcgcgtctaaaccttcaatttactcctgtgtattacgacgataaattcagttcgtgatacacttttggcagttttaattttttaaattctttatatcgttatgagccaaaagcagccttatacgcccggtgagtttcaatggtcctttttgttacctaaatattggggtgtgtggattgcgattactttcttgatgcttttggctattttgccgtgggcaattcaatggcgcttagctcatggattggcaaaccttgcttggaaatatttaaaatctcgtcgtaaaaccacaattcgtaatttagaggtttgctttccagaatggacacctgaaaaagtacagcaacaagcaaaacaagtttttgtagatatgatgcttggtatttttgagaccttaaacgcatggtataagccttactggtttaaaaaccgtgtcactattgaaggcttagaacacattaccaatgcacaagctcaaggcaaaggtgttttattgcttggtacacatagtactttactcgatgcaggtggttatgtatgcgcccaatatttcgagccggatgttgtgtatcgccctcaaaacaatcccctcctcgatatgctaatttatcgttgccgcggcacaatttataaagcacaaattgatcatgatgacatgcgtggtttgattcgtcatcttaaagagggtgatgcaatttggtatagtcccgatcaagactttgggcttaaacaaggtattatggcaccattttttggagtgccagctgccactgtaaccgctcaccgtcgtttattaaaaatttccaaggcggttgctgttcctttatatttttatcgtcatggcgatgtgcaagatcctaaatatcatattctaattgaacctgcggttgacaatatgccaagtgaagatgaagtcgatgatgcaacgcgtgtgaataagattattgagaaccagcttcgtatcgcaccaactcaatatatgtggtttcaccgtcgttttaagacacgtcctgagggatatgaagagatttattaagataaggctgtaataattttagattagtaataggcacagcctcgatttaaagtgatattcaaatactttcggataggcagaccttactttttagggataaaaagtaagcaaaaatcctttgttccgctgatgttacatccttgtaacacaacgcaacagcgacatccatgtcgctatcacgatagtaaactctggataatgatttagtttgagatgatgtatctatggatgatccatcttttatgaacgtataaggcaaaaaacaatgaaagtgatgcaacttctcccagaacttaatagcggtggcgtagaacgcggcacactggaaattgcacgtgcactggttgcacaaggtcatcagtctctagttgtgtctaatggcgggcgtttggtctcacaacttgaagctgaaggttccacacacttaacgctgcctatccataaaaaatcattgtcaagcttgtggcaaatccgtccattacgtcagctgattgaagagcaccaaccagacattgtacatgtgcgctctcgcgtacctgcgtggctaacccacttcgctttaagaaaaataccagcgaataaacgccctcacctcattagcacggtacatggtttctattcagttaatcgttatagtgcgatcatgactcaggcagaaaaagtgatcgctgtttctgacagcgtagttaaatacatcacagaccattataaaaactgtccaccacaagatattgtccgtatttatcgaggcattgaccctgctgcttttccgcataactaccaaccttcagcacagtggtttaaccaagtttttaacgactttcccgaactcgagaataaatttttactttgcctacctggccgtattactcgtttaaaaggacatgaaagtttaattgaactgatgcaaaaactaggtgaacaatatcctcaactgcatgctgttgttgtgggtggggctgatgtaaaaaaacaagcctatttaagtgagttgcaaaacaccattcaaagcaaaggacttgcagataaaattacctttgtaggacatcgctcagatatacgcgaatggctcgcttttagcgatatagtgctctctctatccaatcaagcagaaacattcggtagaacagcattagaagccctttcggtaggcacgccggtcattggctggaaccgtggcggtgttgccgagattttatctcatgtatacccacaaggtcttgttgaagcagaaaatgaaaaagctttagtagaaacagtaaagaatcatattgaacaaccgcaaacagtcgctcctgtgacaatgtttagtttaaaagatatgtgtgaccaaacccttgagctatatcaaagtgtattgaaataacccaataaaaaaacccgcgatgttcgcgggtttttttcgactaaaaaacttctctattacttaagagatgcttcataagcagcagctttttcatagtcgtattgtttttcccatttactgattacaagtacagcaagcgcgttacctacaacgttcaacgcagtacgagccatatccatgatacggtcaacaccagcaataaatgctaagccttctacaggaataccaacactacctaatgtcgccaataacacaacaaatgataccccaggaacacctgcaatacctttagaagtaatcattaacgttacaactaaaatcacttgttggctgattgtcatttcaatgccgtaaagctgtgcaataaagattgctgcgatactttggtaaagcgtagaaccgtcaaggttaaatgaataaccagttgggattacaaaactagaaatcgcttttggcgcaccataagcttccattttttgcataatacgcggtaaaactgtttccgaacttgcagtcgaatacgccaaaattaattcatctttcaaaatcttaaacaaagtaaagatattgatgctgaacatttttgcagtaatacctaaaaccactaaagcaaagaataagattgcaccataaactaatacaaccaacttacccaatggaataagcgaagcaaaaccgaagtttgcaacagttacagcgattaagccaaatacacccactggcgcatatttcatgatgatgtgtgttacacggaacattgtttccgatacagcatgaaatacatttaataatgggtcttttgttgttgctggtaatgaagataaaccaataccaaatagcacagcaaagaaaatcactggcaacatttcgccatgcgccattgaactaataatgttcgttgggataagcgataatatcgtctggataataccatgagactgtgactgtacttcttcagttgtatgcttatattgagaaatatcagtttgtaccagttgagacatatcaatgcctgaacctggatggaagatattcgctgcaaacaagccaaccaaaatagcaatagtagtaataatttcgaaatagagaatggttttaaaaccaagacgccctagactttttgtactgccaacaccagcaatacctaaaatcaatgtagagaaaacgattgggattacaatcattttaatcaggctaataaagatcttacctaatggagtaagaacgttatttacaatactatctttgatttcaggctggttatgtaaaacagccccgacaactatccctaggattaaagcaattaaaatttgccatgcaaggctaaatttaaaattcttcataagacaatccttatgcaccgcaaagtatcaaatatgagagggagaagaccactactttagagtgaaacctcaatatgtacacgaatttccaaacagaaatttaaatgcacaagcaaatcacaacccgccgatccggcgaagtaaacaacaatgcctgttgacgatccaacatgtcaacgatcggcacattctattgagatttgccaattaaacaagtccaatttatatctaaataggtcaaagcctagatttatccgtcaataatctataaaaacaaaaacttaacaaaaaagttttttgtatccattttcattaaaaattgctcagatatataaaaaaatttatggacgatgacttataactgagtagatttttaaattaagaataccttaaaaatattggttttatttacaacgaattaaatgatatatctataaaatatcaacccgagttctgcgtcctgcaaaactcgggtaaatgaggttgtgctttcagggtatataattctttttatcgcttccgttctaacatcttatccgtgatgtcgttccatatcagcttagtgcatccttacttgggattatccattcccgcttccgtgtgccgatgaatgtagaatacgggttttaactctgtctgcctattggacctagactcaaatctttgtacgttattgcttacaactcactttatatatttttctctttataaggctgtgcaatttcatcagtcacgattttttcttctttttcagctttagcaataccttcttgtatcgcggcttgagcttcttcttcatcggcttgagtttgttctagttcctcgtgaatttcttcaaatattcgacctgtttgtaaaacgacatagacaggaaaatggtctgatccaatatgagataaacgctgcatttttactaaaccgaagtctgtactatgaaagatatggtcaagtgaccagcgcaataaaggatagtccgcatgaaaagtattaataaaatgccgccccactcgtggatcgagtagcccactaatacgttgaaataaacgggttgttcgtgaccacgctacgtcgtttaaatcccccatcacaatacaactttcatcaagatctttaatttgatctccgacaattaaaagctcagcgtcacgcagtgttgaatcttttgcttcagttgggctaggtggcttaggatgtaaacagtagagctgaacaggcatgccagatcgcaaaattaccgtggtatgaatagaaggtatttcattacttaaaatgaatttaacctcagtatttttaagcggtaaccggctatataaatgcatcccgtataaattatctaaaggtacgggcacacggtatggataatctttctcgatctcttttaaagcattttcccaagttgtatcgctctctaaagtaagcaataaatcaggtttcaacgtccgtacatgctcaagtaataaatgatatttatcattcggggtgagcacattagaaactatcagtgaaatctgttttgtaggatctagctgatgctgtttgacctttttaacctgttttttccaaaacagcgtatacggtaaaaccattttaagttggtaggcaatcgctgcgatgagtaccgcaagcaaaagctcacgccatacgtcccattcggtcggccaaaacaacataccaattaaagcaattaagccaataaacagaatttgtaatcttggaaaatctgcacctcgaaaccaccactcatcacgaggaataagtgaccagaagcttaaccaaatcaccactactgccagtacttcgatataaatcattgaaattactcttttaagatgatttgttttttaatgtttttgtcatctttatcaattttgtatgtaacataaacaagatattctactcaataaaattgctgttttgattctgtaacgcttgcagttgtgagcacttttgatacactcaactccccctttaacaattttaacgcaccgaggcaaaatgacatgaaagtaggtctggtcggttggcgcgggatggtcggttccgtccttatgcaacgtatggttgaagagaatgattttgctcatattgagccattctacttctctaccagtaatgcaggtggtgaagctccttcatttggtggtaagactgccccagcacttatggaagctacagacattaccagtctgaagcaaatggatgtcattattacctgtcaaggtggtgactacacgtctgaagttttcccaaagttaaaagcaactggttgggatggctactggattgatgcggcatctactttacgtatgactgatgatgcaatcatcgttcttgatccggttaaccttaatgtaattaaagacggcttagcgaaaggtactaaaactttcgttggtggtaactgtacagtatcactcatgttgatgggtgttggcgcacttttccaaaataatttggttgagtggatgactgcgatgacttatcaagcggcatcaggcgctggcgcacaaaacatgcgtgagttgttaacaggtatgggttatttatataacaataccaagactttgttagatgatcctaaatctgcaattcttgatattgaccgtcaagttgccgagttacaacgcggtgagggtttcccttctgcgaactttggtgtgccacttgctggttcattaattccttacattgataaacagcttgaaagcggtcaatcaaaagaagagtggaaaggacaagttgagaccaacaagatcttaggtaactctcaaatcgttcctatcgatggtcactgtgttcgtatcggtgcaatgcgttgccactctcaagcattaaccatcaaattgaaaaaagatgttccgcttgatgagatcgaagatatgattcgtaactcaaaccagtgggctaaagttgtaccaaatacacgtgaagcatcaatgactgatcttacacctgttgctgtaactggtaccctaactgtacctgtaggtcgtttacgtaaactcaatatgggtaaagagtacctcggcgcattcacagtaggcgatcagttactttggggtgctgctgagcctctacgtcgtatgttacgtattttagtagaatacaaaagctcataatttgatctgaattattcagtcaaaataaaaagccgatcacatttgatcggctttttcgtaactggtttgtaaaaaattaacaatttatttacatttcattattgtataattttgaacgactttacgactgatcaggtcatggattgagatgactgcatataacaaattaaaaattgccattttcaccattatgtcttcgccttctatttatgcgattacattagatcctattcaaattcaatctgcacctggggaattactttatgcagaaatgaattttcagcaagcagatcctaataccccattgcaagtcagtttggccactcaagatgatctcaatggtttgggagtaactcatcaacctccgggtaacctaaacttttatacacgccaaaatggtcagggttctggcgttattgtgattacctcatcgcgtcctattatcgatcctgaactgaatattgtcgtaaaagtcagtgaaggtaacgcaacccgtcttcaacatattaaaaccgttttaaagccatcgcctataaaaaaggccgccatgaacgaaagtccactttcaccgcaatttatcgtaaatgaaaaagatatcgcattaaatttacctgaaagtactcagtacacatctactgaaaatacatcaacggtggcagaaaccacaagtaatgaacataatctaaatattagcactggaactgctccagctttgaatagttctagccctgctcctgtggctccttttaccgaaaaaccttcgactcaaacacttcagccaactatagctacgatgaataccgaatcatcggctgtagagaaacagccttcgacttcactcaaatcaagtgatggcaatcaaacaactaccgtcaaaaaagcagcgcaatctaaaactgcccaacaaaaaaatgtattaagtaaaaatacgccgaaaaagcaaaaaattagcgcttataaaggcccggcacctactggtaaatatgtcgtacaacgtaacgagtctttatggagtattgccaatcgtattgcagcacagaccaaacaacctgtggctaaaatcatgcgagatatccaagcacaaaaccgacatgcttttattcaaggtgatgtaaaccgtttacgtcagggaagttcgctaaacttaacaacaaatacaactaaagcttcccatttaaaacctaaatcgagtgaagctcacttggcaaaaccctcttctggcagagctaaatatcgtttacaacaagctgaaatgagcattgtggcagagaacagcccaaattctgctcatggaagtgcaaaaaagagcacacaacaaagtcaaaacaatactgagttagcagtaaaagttatgacaactcgcaaaaaaaccgttacattacaaaggaatgtaaccaaactaaatcaaactttaagtttaaaagaccaacgtattcaactcttgaatgcgcgtttggcagagttacaacagcaattacaggcacagcaacaaactcacaagcaaaaacattaagttaaaaccagagttagcacgctttatattgcaaatatttattttttaaggggaaagtaatgttatatgtgattccgtttatcatattactcgtggtcgccgttattttaaaaaaacgcgagaatagtcaaaaacaagaggccacttccccaaaaaatataaatagaaaatccggcaaaaaagcgagtgctaaatcaagcaaaagttcgcgtgaaaaaacaaaagccaaggtcattgaggaaaatactcctgctatccctcaaagcaatcctgtacctgaagctttgcgacacaatattcaacagctcattcaagaaaaacagttttcagcagctgaagctcaagtcaatcaggcgctaaaaaaagataatactcaacatgaactgtatttattacttcttgaaattcatattgctcagaaagatgaatttgcaattcaacagttgattagccatattcgtagcttaggtttaaatgaaatagcagctcaagcagaaactcgacaaaaagaatatgaatcatccagacaacctgatgctattgatttccctcaagctcaaacatatgaagaaccgaaaaacacagatacaacggctcagttcgatgaattaacaaccagttcttccgaggcttcttttgatgacctacagaaagactatacgcccgtaaaacaagaacctgctgttgaaattgaacctttagagtttaacttttcattcgaacagacttcggctacggaaaataccaaccaaccagcacaacaacctgagttatcatccactcaagaaacaaatgagctggccgatttagagttttcttttgacttggcacctctgcatggaactgaggaaaaatctcaaccagtagagctaaaagcagaccaagaaaatagcatcaatgcattagattttaactttgacttaaatccttcaagttcagagacgaaatctgttgaacaagctccatcattagatgaaattaaactcgtagaacaaaccccattagaagcggcttctatcgcacctcttgagttttcgttagatgagcctgccttagttccagcgccagagcttgaaactcaaagccatatagatgtagtaaatgaagcagctactcaaacccaaatagaggatccgcttttagaagcttttccagaattaaaacaaataaatgaaaatgaactcgatttaaaattggctgaacaatacattaagtttggagcgaaccaagcagcgtgtaatttactacagggtgatgagcaaaaattcaacacagaacaacaacaacatgcgaaaaacctacttaatcgcatagcttcttagaactgttcgatttaccataagcagtcagagatgactgcttttttatgcctgcaaaaagatgaaaaaaatagctttattttatatgggtggtacttttggttgcattggtgaacctttagctcctatgccttatgaccaattcctacctcaacttgagaaagtgattcccccacacttaacagttcattgctttgctgcgcccaatattgtcgatagcagtgcatgtacagcacctgactggttacgcctaattcaacgcatacaacaactacaactagaaggctatcagcattttgttgtgattcatggtacagatacgctcagttatgcagctgcgactttagctcgctttttagggcaaagctgtcatattgtgattactggtagccaatacccgttactcaatattcaaggtgataacacccgtgaatttactgatgcaattgaaaacttatatcttgcattagagcaggtcattgcacttccggttggtgcttatctcgcattccaccatcaagtatttcacgcacaaactgcattaaaaacgcataccactgaacttgatgcattttcagggttaagtagtaacgttgagtttacgcctcagcaaaatgaattgatcgtacaagatgctcaaattgaaaaagctgcttcctttcagattttaaactggatgatgcagccgattgcaacacagcatttagtacaacaattacgtcacttacttcctgccccaccacactttttagtgttgcaaggtttcggtacaggtaatatcgccgtaaacgatgagtttttggcaacattagatgaactctatactcgtggatgtgtaccaattttggcgacacaagtcacttttggaggtatggaccaacgttatgcaattagtgcttgggccaaaactgcaaaaattgtcattaatgatgcccatagccatgcagatctctatgcaaaagcgcttcaaatctatttaaaatacccaaccccagaacaatggttgaaccattggaatgaaaatctgcattaaatagaggtgaagccatgcaacgttatgcggtcggtattgaatttagtggtattcaatatcgaggttggcaaacacaacagccaggcgttgccagcgttcaggaaactatagagcttgtactcagcaaaatcgctgatgaaccaatcacacttcacggtgctggtcgaacagatgcaggagtacatgcaacaaatatggtggctcattttgacactaatgcgattcgtccagagcgtggatggatcatgggagcaaatagccaacttcctaaggatatttcaattcagtggattaaacagatggatgaagagttccatgcacgttttaaagccactgctcgtcgctaccgctatgttgtatataacgctccacatcgccctgcacttttacataaacaagtcacgcatatttatcaaaaattagacgtgcaaaaaatgattaaagctgccagcaaatttgaaggtacgcataactttgaaaccttccgtgcagcagcctgccagtcaaatcaacctgtacgacatgtaaagcattgccgattgtttgaacatggacgttatttggttttagatattcaagctgatggctttttacatcatatggttcgaaatattatgggttgcttacttgaaattgggcaaggcatgtatgaaatcgaccatattgatgcaatgttcgcagccgaagatcgtaaggcagcaggaattaccgccccacctgatggtctctattttattcaatgttattatcccgagcagtttgacttaccacaaccaccactcgggccacattggttaaacctacctgagtaggcttaaccaatttttagttctaacggtgttgcttacgcttacggtactcaactggtgtttcgttagtccagcgcttaaacgcgcggtagaatgtactcggttcagaaaaacctgttaaatacacaatacgctcaacactctcattagtgttagctaaaagttttttagctaaacgacaacggtagtcagaaagtatttgctggaagctggtatttgcttcacttaactgcgtccgtaaacgacgcggcgtaatatttaattgtgccgctacggtttctagcgtcgtttctccactttcaagtgtcgaaccaatcgcacgacggacctcacccactaaatcataacgggcaagttcttgtaacttttcaattgccaattgttcatgcaattgaagtaattcaggctctgcctgccaaagctgaaaatctaaaatggcagggtcaaaatatagccgtgtttctttctgccctaagcttaccggacagccatagacgcggaagtattcatcttcagaagcaccttcactgaaattaaaatcaatgaagattggatggaactggccttcggtaataaatttgaagaatctgagcacacctgaaatcgcacattctgaaaaatgacgattaacaaggttgtctgcccctacctgctcaccattggtcaaatagcagcgtccatcttcaaccaccagttttgcatcaaatgcatcactaatgagacgctggtaagccaaagctcgcttaagcccttcaccaaaagtttcactactaataaataaatgttcaatcacctgaccacggtacaaaggtaaatgctcacctaaatgcaaaccgatgtctggatctttactgacttcttgagcagcagtccaaaaggcatactgcgcacttaacggagtacgtgcgtttgtatcgacctgatttaaagcgactcccgctttagttaatatttcttctgttggcaatcctgcacgacgaattgcttgatagccaaaacgtaatacaactgatgcatctgttagctgacccacgcagtgcccttccatgtagatacttcattgatacttaggagctgttgactctttatgcatgaacagtccctaataactatgattttagattagcgttgattgaccaaactgacaacagaattagagttcttttgtgaaaaaaattacatctttttttattagtcatactttaaccagatgctttcacaagaagatgtctatcttgttttttttaaataaattgactataatttgcgcctttccaatttgatcatcaggtaggctatggccaataaagaggaactcattgagttcgaaggcgttgtcaccgaaacgcttcctaatacgatgttccgtgtacgtcttgaaaacggtcacgaagttattgcacacatttctggtaaaatgcgtaaacactatattcgtattcttactggcgacagtgtgaaagtcgaaatgactccatatgacttaaccaaaggtcgtattacgtaccgtgctcgctaattagtgaatgcaaaaaagccacttcatcatgtggcttttttattgcgttttttattcacttaatcgactggttttacatcccaccgtttggcattcacgcaatctttcttgcagccaatggtttctttcttgcgttgtctgtaaacgacactgcacgtctacgctatttctattagaatctgtacattcagcatcacgttggcgtatccaagcaagctgcgacttcttaagcgtatttctttgtgctgtatttaatttcgctcttaatgcctgataattcttattcaggtctgcatcagcactcgcatagattttattggtacagtaaatatcatcataagtattacgagcactatcacagttatcagcatagaccgtggttattccgaaacacaaaaaggcaaaaactatttttttcatactcttcttccttaagttttgggcaattattattagtctgtaaatataagaataagtctaaaggcaaactcaccttctatttatcataatcctgcttttttactttacaagttagcaaatccaacctattgttctttaatgataaatataattctatatagagaaaaaatgaatatatctaccttatgtcaaatgagtttgctttcattcatgctgcttaatattaacggctgtgctagtcatccacgccaatctatagatttacaagaatatttaaaaaattttataggcaaatcatctacaacgattcagcaagatctcaacttacggagtcttggctttcaagtcgcccgcacaccacaaaaaacttctgatcaacttatttatacaattttacggcccttaagcatcccaattccaatggtgagtaatgtcgatatgagaggtggttctgttcccatacaatcaggaaatttgagcggcaactcttatgatcttaactttaattgcaaggttatttttaaactcaaaaatgacattgccgagtctattcaatacgaaggtaaagcttgctaaacacaaccataaaaaaacgcagctttaagctgcgttttttagcaaagtggcgattaagcaagagcagcaacaactgcttcacccatctcggctgtaccaactttagtcatgccttcagacataatatcggctgtacgtaaaccttgatcaagtacttgccctactgcatcttcaattgctttagcagcagcttcttcacggaaggtataacgaagcatcatcgcaactgaaagaatggttgccaacgggtttgcaacgttttgccctgcaatatcaggcgctgaaccatgacaaggttcatacatgcctttgccattttcatctaaagaagccgatggcaacataccaattgagccggtaagcattgctgcttcatcagacaagatatcgccaaacaagttacctgtcacgattacatcaaactgtttaggcgcacgtacaagctgcatggcagcattatccacatacatatgtgaaagctgaatatttggataattggcttgctgtaaatctgtgaccgtttgcttccaaagctctgttacttctaaaacattggctttatctacagaacacactttaccgccacgtaatcctgcaagttcaaaagcaacttttgcaatacgcttaatttcgctttcagaataaacgtcagtgttatagccctgtttttcaccattttcgagttcacgaataccacgtggttgaccaaagtagataccaccagttaattcacgaacaattaaaatatctaagccagcaacaatctcaggctttaagctagaagcatcggctaattgtgggtataaaatcgctgggcgcaaattagcaaataagttaagttcactacgaatttttaaaagaccgcgttcaggacggatagaacgttcaatagtgtcccactttggtccgccaacagcacctaataaaatggcatcagctttttttgcttgctcgctagttacggctggatacggctctccatgagcatcaatcgctgcaccacctaacaagccatgttcccaagtcaacgacaaattaaatttttcatttactttatttaatactttttctgctgccccaacaatttcaggaccaatcccatcgccagccaaaattaaaatctgtttagacatgaagttttccattttcaaagacaagacagcgttacgactgccgtggtgttagttttttctgttcgagaaattcacctagtcctgtggtgacatcaaatggtcgacaaaaacggcgaattacccgcccatcctgctctaagtcaacacataatggatctggtacagaaacattcagcaaactacccgaacggttagatttgtctcggtacattttaaacatatagcgatggttagctttgaattggtgaataacatgaatcgtttcagcccgatctggagaaatcggatagtaacgaatcaccacttcatattgtttggcaggcacagatagatacaaactattgctttgacttaacaccgaaccatttaatctcacaattccttgatgaattgcctgattactaatacgacgtgtctgtgcatcaacaacagtaatatcatttagccgttcaaattcgcaactttttgcgcccgaacaatatattgctgcattctgccccaaattttcttgttcagcctgcttaatacgaacagtatccactacattgtaagtgctctgacaagcacttagtgttatcgcgcacaggctcaacaaaaagctatgagtaacgttcctcttcattgttcaagcccaatcctcatctagtgcataattttaagctgttgttatgctttagcatgttagcaagagtttgaacacgacgccatgactatgtttaaaatgtaccgaaaggttaatttatctcttggaatacccaaggacgaacctgtttggttttttcttcataagcgcggattgcgtccgcattttgaagtgtcaagccaatatcatccaaaccatttaacaagcaatgcttacgaaatggatctacttcgaatttaaatgcttcgccagttggtgtacgaacttcttgcgcagccaaatcaattgttaattgatatccttcttgcgcagcacattccttaaataactgatcaacaatgtcttcaggcaaaatgactggcaacataccgtttttaaaacagttattaaagaaaatatcagcaaagcttggcgcaataacggtacggaaaccatattcatttaatgcccaaggtgcatgctcacggcttgaaccacaaccaaagttggtacgtgcaattaacacggttgctccttgatagcgaggctgatttaaaacgaaatccggattttttggacgtaccgagttatcttgtcccggatagccttcgtctaaataacgaagttcatcaaataagttgtcgccaaacccagtacgtttaatcgactttaaaaactgttttggaataattaaatctgtatcaacattggcacgatctaatggtgcaacgataccttgttcaactgtataagctttcatggtttgctccagaccgaattaaaatgaacgaacgtcaacaaaatgacctgcaatcgcagccgctgctgccattgccggactgaccaagtgagtacgaccaccattaccctgacgaccttcaaagttacggttcgaggttgatgcacaatgctcacccggttgtaacttgtctgcattcattgctaaacacattgagcaacccggctcacgccattcaaaaccagcttccaagaagattttatccaaaccttctttttcagcttgttgtttaactaaaccagaacccggaacaatcatggcttgcttaatgctaggtgccactttacggcctttaactacttcagcagcagcacggatgtcttcaatacgagagttcgtacaagaaccgataaagacacgatcaagttgaatatcagctaaagcttgtcctgcatttaagcccatatactgataagcacgtgtccaatcattacgttgtacgtcatctttcgcttgttctaaagttggtacagctttcgagacaggaataaccatctcaggtgaagtaccccaagacacttgtggttcaatctccgcaccatttaactcaactacagcatcaaaaacggcatcaacatctgaatgtaaagtgttccagtaagcaacggcttgttcccactgctcaccttttggtgcgtagctacggccttttacgtattcaatagtcttatcatcaactgcgaccatacccacacgagcacccgcttcaatcgccatgttacataccgtcatacgtccttcaatcgacatatcacggaaaacttggccaccgaactcaattgcataacccgtaccgcctgcagtaccgattttaccgataatggccaacacgacatcttttggtgttacacctttacccaatacgccatcgacgcgaaccaacatgtttttagattttttctgaaccaaacattgtgttgctaacacatgttcaacttcagatgtcccaataccatgtgccaagcaaccgaaagcaccgtgagtcgctgtatgtgagtcaccacacaccaccgtcatacccggtaaagttaagccttgttcaggtccgacaacatgcacaattccttggcgaatatcattaataccgaattcaacaatattaaatgccttacagttatcatctaaggtctgaacctgaatacgagatgtatcatcttcaataccagcgatgccctgatcacgttcttttttagatgttggaacgttatggtctggggtagctacgtttgcacttaaacgccacggttgacgaccagcaagttgcaaaccttcaaatgcttgtggactcgttacttcatgcaataaatgacggtcgatataaagtaagcacgaaccatcatcacgctgagtaactacgtggtcatcccacaatttgtcatataaagttttgcctgccatgtcgtcttgctccattggactgggtaattctaatctttcttcgattatagccagagttttacataaatctaatttatcatttttataaattagaaaacttttaggaataattcctgaatgttttaatatcagtcaaaatatataaatcggatttgctaatgattatcatttgcataatccatttttaatcctatactctcatctctatactaaaaatatcaaatacaggtagagagaatggttatggctaatattcaaaaattcgttgttaataatcaacgtacattaaagaaaaccttaagttactacataatgcatattacggtagccatgttagttgcctactttgtaacgggtaatatttggatggctttaacattaagtatgttagaaccaacagtacaagcttttgcatttttctttcatgaaaaagtatgggcagcaaaagaccgccgtatatcagctttaagcgaaaacgagacgactgcttagattaagattaatacgctaaatcacaactttatagaacgttgagctgcaagcatgatacgattttggcttggcaactttagcctctctcgatttttctattccaagtagagttgtattatgaatcttgcagcctttgaagcttttgtaaaagttatggaaacaggttcgatctctgtggctgcagatcaactatttattactcaacctgctgtcaccaaacgtattcatagcctagaagagtactttggcgtaaagctatttgagtcggcaggccgtggggttcaagcaactcatgctgcgcattcattattaccaaaagttaaaagctggttaaatgaacttcgagatattcaccacacgctaagtcatgagcaaacccaaatacaaggacgtttaaaaatcgggacgagtcatcacatcggtttgcatcacttgcctgctccgcttaaacactttgttcagcagtttcctcaagtcacgctagacgtacattttgttgattccgaacaagcacacgaacaggtacttgctggcgatttagagttagcttttttaacactcccgccctcaggtgatgagcgtcttaactatattacgatctggaatgatcctttagtttttgtagctgctccatttcatccattggctcaaaaaaagaatttgaccttacaagatttaattgaatatccaagtttgctgcctgccgcacagacttatacagcccaaatcaccttggctgagtttgaaaaacaaggccttaaaccgaaaattaccatgagcaataacccactagagtcaattcgtatgttggtctctattggtttaggttggtcagttttaccaaaaactctgctgaatcaagatatgcagcagcttgatttaaatgtcgagatgaaccggcagttaggcatggtatggcatcctgcacgtactcaatctagagccatgcaggaattgattaaaatgatgcaagaataacggtattaatggctatattttttaacaaggatataaatcaaagccgcgaaaggtagtagtaaaaatagaacgccccaactgaaacatatagcagcgaaaataattccgccaagtgcactcataaacagtaaagcaatgatataaataagtaactcaccaaaaatagcggtaatgagctgatctataaattcttgaaagaaaccattgctacctttacttttagtgcgcttatttttagtcatgctattttaattaataaagttatatattgattagaaataatactataaatatataccctctactctactatcattatacttttcacttaagattcatgatcgtgaagaatcaatattcaaagataattaaaatcggtttatatctatttataactttagctatcttagttctagttacatttatttggtttaaacggatacgtgttattttcgcccatcacctttcattgttacattgtgatggtcaagtctgtgtagatgatccaaagacacagcctcttgcaaagacactttataatcaggcattaaaagagacccaaaataaagtaggtgcttttcatcaacaacccactatggttttttgctcaactccacaatgtgcaaatacctttggtatggaaaaagcagccgctaaagcgattggtaatttggggttattggttgcaccgcgaggctggaaagatttctatatcactcatgagcttattcatcatcgacaagcagaagaatggggaaatatagcaatgctaactaaacctaaatggctggtagaaggcatggcttatagcttaagtgatgacccacgacctactttatcggttccttttcaacaatggcgagctcaattcaagctttggcatcaacaaaatcctgattcaaatatttggcttaccacagaaaaaattaaataatttattagagagcttccggaatattacatttttctaggaagctcttgctttaaattaaatcgaccagtcctgaatttcccagttgtgttcttgagccagtttctcaagacgatcatcagggttgactgcaatcgcatgcgttgcatattcaagtaaaaaacggtcattaattgaatctgaataagcccaagactcagaaacgctacgaccgtccagccatgcctcaagacgtgcaagtttgcccttttgataacacgctaaacccgccactttacctgtatatttaccatcagcaacctcggcgttagttgctaagatttcagtaattccaaattcacggaaaatcggcgcagtaataaaatcacttgttgctgtaatacctacaatggtatggcctaaatcttgatgttttttgattgcatcaaaaccttttggtcgcatttgaggacgaatcactttttccataaacaactgatgaagctcagttaagtagttattatcatgctttgttaaaaagccgaaaacaaactcattataagcatatggatctagttgccctgctttgtagtcttcataaaatttatcattcatctgacgatgatgaaccggatcaaccaaaccttcattgactaaaaattcaccccacgagtggtctgaatcggtatttaacaaggtatggtctaaatcaaacaacgccagtttcatgaaaattctcgtttaaactgaaatttaagaaaaaaaatgtaaatctatctccgctagtcgatagaaattcgttaagatcgtaacaatttaaacattttactttgatcttttcgagctggacataaaaaagtgtttgtccccgtgatcgaagtcaacgatatagacaatatttaggtagccaaatgatcgactcagaaggtttccgacccaatgtcgggatcattttggcaaacgatgatggacaggttttatgggcaaagcgcattggtcacaatgcttggcaatttccacaaggaggcatccagtttggagaaacccctgaacaggcactttttcgagaactgagagaagaaatcggcttattgcccgagcatgtccagattattgcgcaaaccaaaggatggctgcgttatcgtttgccacatcggtatattcggtcagactctgaccccgtatgtatcggacagaaacagaaatggtttttactgaagttaactgcgcctgcaaaaaacattcagttaaacctcgccgacccgcctgaattcgatgaatggcagtgggttagctattggtatcctcttggtcaagtggtgaacttcaaacgtgatgtttaccgtaaagccatggtggagttgtgtacacagttgccagtgcaacaattaccctaaaaatcatttatctagcaaatgatttttattaaaagtgctgttataaatacattcatagtctaaaaaaatactggagtatacatccatgtcaaacatgcaactcgacactctaagacgcattgtccaagagattaatgcgtccgtgagtttgcatgaatcgttagacattatggtcaatcaggttgctgaggccatgaaagtggatgtttgctctatttatttactcgatgaacgcaatcaacgttatgtattgatggcctcaaaaggcttaaatccagaatctgttgggcatgtttcattgcagttaggtgaaggcttggtgggtctggttgggcaacgtgaagaaattgttaaccttgacaatgcgccaaagcacgaacgctttttgtatttacctgaaacgggcgaagaaatttataactcattccttggcgtacccgtcatgtatcgccgtaaggttatgggtgttttagttgtccaaaatcgacttcctcaagattttagtgaagcggccgaatcatttttagtcaccttatgtgcacagctctcaggtgttattgcacatgcgcatgcggttggaaatattgatgtatttcgcaagccaagcaatgggcctgcctataagacctttcaaggcgtttccggtgcaggtggggtggctttaggtcgcgctattattttatatccgcctgccgacttaggttcagtacctgaccgcgaagcagaagatatcagcgatgaactccgcattttagatcaagctatttcatcggtacgttcagagattcgttctttagatgaaaaaatgcatgactcgctcatggcagaagaacgggctttgtttagcgtattcttaagaatgctagatgaaaatgccttacctgcagaaattaaagaactgatccgtgatgggcattgggcacaaggtgcggtgcgccgtgtaattgaaaaacacactgccctatttgcacaaatggaggacgattatcttcgtgaacgcgtttctgaccttaaagacttagggcgacgtattctagcgtacttacaagaagaagattcgagccaccgtgaacttagcccagacagtattttaattggtgaagaaattagtaccgctgcgctagtagaattaccagtagataatatcgcagcgattgtgacgtcagaaggcgcagccaattcgcatatggtgattgttgcccgtgcattagggattccaacggtggtcggcgtaaccgaactgcctgtaaatacgcttgatgatgcagaaatgattgtggatgcctatcagggccgtgtttttgtaaaccctccacgtcgtttacgtcaacgttataaagaaattcaaaaagaagacgagcaaatcgcaaaagatctcaaacaatatgagaccaaagaagcgattacaccagacggtgtctctgttcaactgtttgtgaacacgggtcttatgattgatgtagtccgcggtgtacaacgtggcgctcaaggtgtgggtttgtaccgtagtgaaattccattcatgttacgggaacgtttcccgggtgaagaagaacaacgtgccatctatcgccaacaattgagtcactttgccaataagccggtagtcatgcgtaccctcgatattggtgccgataaagacttaccttacttcagtattgaagaagagaactcggcattagggtggcgcggtattcgtttcacgcttgaccatccggagattttctcagcacaaatccgggcaatgcttaaagccagtattggtttaaataatttgcatatcctattgccaatggtaacgacagtaagtgaagtcgaagaagtactttatttacttgagcgtgactggattgcagtacaagaagaagaacaagttaaaattaccaaaccaaaaatcgggattatggttgaggtaccgagtgtactactacaaattgatgaattcgccgaacttgtcgatttcttctcggttggttcaaatgacttaactcaatacttacttgctgtggaccgtaataatccgcatgtcgcaaacgtctattcacacttccatccgtctattttgcgggctttaactcgactcgtgaaggaatgccataaataccaaaaaccagtaagtatttgtggtgagatggcgggtgatccgttatcggcaatcttactgatggccatgggcttcaataccctttcgatgagttcaagtaacatcttgcgtgtccgaaaagcaatttgccatgtcccaatgtcagatgcccaaaagctgcttgatgatgtcatgaaaatgaataatccgcttattgtaaaaagctggcttgagtactactttaaaactcacggtctagccgatatggttaaatctaaccgccttgtaagcgtataaatacttaaaaaggagagtcaaaagctctcctttttcaattcatctatttttaaattttctctttatttttaagctgccacttagcgcacccctaatctttatttttccaaaaatcggttttaccaattaatatggacaatttaatccatttgaaaaataaacgatcagattctagtatatttaaagaacgaaattgaaagatattgcgatgtttcaatgattaaggagctcatgccatgcgtcattatttgcaaaatttgaaccattttccctcttgttttttagccttcatgcagtaaattgaaggaataataaacaaaggaaactcatgtattgttgaataaaactgatgagctgacataacagtgaaaaatttttaaaacggtttctctcaccatttgttctctcatttctttattcgatacgcatcatttttttaacccagaagtccaggaaaatgagccttcagttttattaagagctcaataaatattacccagagagaatataatcatgtcaaacgaatcaaaatgtcctttttcaggtcataactcaaaaccgcaagtaacagtcggtggtggcacggctaatttacactggtggccaaatcaattacgtgttgacttactcaatcaacattcagaacgctctaatccactcggtaaagattttaattaccgtcaagaatttaaaaaactcgactactacgcacttaaagccgacatcaaaaatgtattaaccgattcccaagactggtggccagccgactggggaaattatacgggcttatttatccgtttagcgtggcatgctgccggtacatatcgtatgggcgatggccgtggtggtgccggtcgtggtcaacaacgttttgctccattaaatagttggcctgacaatgcaagtttagataaagcacgccgtttactatggccagttaaacaaaaatacggtcaaaaaatatcttgggccgatttatttattcttgccgggaacatcgcacttgagtcttctggtttccgtacctttggttttggtgccggtcgtgaagatgtttgggaaccagacaacgatgtaaactggggcgatgaaaaagaatggttagctcatcgtaactctgaagcattggcgggcagtaatcttgctgcaaccgaaatgggcctaatttatgtgaaccctgaaggaccacaagcgagtggtgacccacgctcagcagcaccgtttattcgtgccactttcggcaacatggcaatggatgatgaagaaattgttgccttgattgctggcggtcatactttaggtaaaactcacggcgctgcctctgctgaccatgtccaagcagacccagaaggtgcaccaattgaacaaatgggctttggttgggcaaacagctatggcacaggtgtcggtaaagatgcgatcacttcaggtttagaagttatttggtcacaaacgccaacacaatggagcaattacttctttgaaaacctcttcaaatacgaatgggtacaagaacgttcacctgctggcgcaattcaatgggtagcagcagatgctgaagccattattccagatcctttcgacccatcaattaaacgtaagccaacgatgcttactacagatttgaccctacgttttgaccctgagtttgaaaagatctctcgtcgtttccttaacgatccacaagcctttgccaatgcttttgctcgtgcttggtttaaattaactcaccgtgatatgggaccaaaagcacgttatttaggaccagaagttcctgccgaagatttaatttggcaagatccattacctgctgctagcgctacaccatcttctgcaagcattgctgatgcaaaagcaaaaatcgttgctctagggttatctactggtgagttggtttcccttgcatgggcatctgcatcaacattccgtggtggagataaacgtggtggtgcaaacggtgcacgtattgctttatcaccacaacgtgagtgggaagtaaacaaaaaagctgttgagactttaactaaaattgaagaactcaaggcatcaacccaattgtcattggcggatttaatcgtgttagctggtaatgttggtgtagagcaagctgctcaagcagcaggtttcaatattaccgttccgtttgcccctggtcgtgttgacgcattacaaagtcaaaccgatgttgaatcattccaattactgctcggtcttgctgacggtttcagaaattggaaaaaacagggagtcaacacaccagctgaagtcttattaattgataaagcacaacaactgactttgactgcaccagagttaactgcattgattggtggtttacgtgtactaggcactaactgggatggttctcaacatggtgtcttcactcagcaagttggggtgctcagcacagacttcttcacaaacttactcgacatgtcgaatgtatgggcacctgttgattcaacaagtgaagtatttgaaggaaaagaccgtaaatcaggcacagtgaaatttaccgcaacacgtaatgatttagtctttggttcgaattctatcttacgtgcattagccgaagtttatgctcaggcagatggtaaagaaaaatttgttcaagactttgttgctgcatggactaaagtcatgaatcttgaccgttttgacttagcttaatttaagccaaaataataaaaagccagttcaaatgaactggcttttttaatacaaaacaatgaatttttagacagtcaatttatgcccttctcgaatgcaataaaaaggattagcaagctttgatgaagctttaatggcttgagctaacgcatgttcaggatcttcacgcccctcatccgttaactgaaaagttcgatagtgaattgccaccgaccgatgtgcttgtaaatctaaatgcgcatgaactgcatcttgcggattcatatgaacatagctcattaatttacgaggttcataagctccgattggaagtaaggccacacgcggcgcaccatagcgcgtatgaatttgtttgaagtggccggcataaccggtatcacccgcaaaaaaacaatgtcctgttttcgccaaaaccgaaaaaccgccccaaagtgccttattttggtcacgtaaaccccgccccgagccatgctgagcaggtgtataaacaattcttaattcgtgataaggaatttcctgccaccaatccatttcaattacatggaactctttaggcaagtaaaatccgttgccaagccctgtataaatcggcatagcaaacttcttatgcagccactcaagcgttgctaaatccatatggtcataatggttatggctcaacaataccccatgaatggtaggtaactgttctaaagcaaaacccgctgggcatacacggcgtggaccacggccatgtaaaggacttgcgtagtcacaccataccggatcggtaataaagttataaggtccaatttgaatgagtaccgtagcatgccctacaaaccaaacttgccaatcatctaaatccgcatgaggacggttttgtggtaaagcaattggtgtattaacacgtacatcatattcattctgaatatcaacattccaagtataagactcacgagtgactaaccaacgcaataactctttcgatcctcgtgcaggcgatctaggctgctgattataaaaacgggtatcattttcatggcccagttcaggatgacaaaaaggtggttttatccatgtatgcgtccaacaggactgagtcggcaattgataagttaatgtcggcttgtctttcatgggcttattctatggttgtagcatcaggaggatgaatcattcagttttctatcttagcgatttaaataaattaagctatgacacttacacttatttatcatataaatatcccttttatttttgtcacagccgacatagatcaatctaaagtgccacaaaaaaatgtttagatgtgttgagtttgtgattcgttaattactattcttattaaaagctactgtataacataacaatagaatataataagcaaagacttacaacagaggtgagctagtttctttgtggttaatctcttatttttaaaactgctcaattttatcaattttgcttcatatataaactattaaaccaagcagcacatgcattgaaaaaattaaaaaaatatagcaagatgaaccgaaacatttattaacaaaatactccttacacattttttgttagaaattaagattctcaattgttaaattaacaatactttttttcataatatgagaaaactttaagtgaatttctggaaagtaatttaaatttcttttctaaatttaaaatcactttgttatgaatatgaattaatatattttacaaattaataattaaataaaatttcatattaatttcataatgatttataaattttcatttattttataaatacctaaagcaccttcacgctatatagttttatgctttatactttgcttaaatcatagtaagacattttttggattagtcttatggaattacgccatcttcgatatttcattacagttgctgaagaattaaattttagtaaggccgctctcaaactctatactgctcaaccctcccttagccaacaaattaaagatttagaagaagatgtcggggtacgacttttaaaccgcacaaaacgtaaagttgagttaacagaagaaggtgaagtatttttagagcatgcccgtttaacgcttgctcaagctgataaagcagtagcgatggcccgccaagtctcaaaggctaaacaacaattattacgtatcggtttcgtccccatagcagaaatgaaaatttttccatacgtacttccaaatctgcgcttacaacaccctgacctcaccattgaattatcaagtttaaataacgctgagcaactcaaagccttaaaaagaggtgaactcgacatcacgtttacccgtgataatactgaaaatgatgaaatccaaagccaatttgtcttaacagaacctttaatttttttattaccaagaaaccatccacttgcgaaatatgaccgtattccggtcaaagctttgcatggtattgattttattattccggcagctgaacaatctaatacactacacaatacaattttagagtttactaaaactcatggtattgacctcaatattgtacaaaaggccgatagtattttacttaatataaactctattggttcaggcttaggttgtactattttacctgcctatgtcgcgcctttaggggtctctaacactgtagttcgccctctagatgtcgaattaccttctttagatttatttgttagttatcgtaaaaatacagagtcagtcggtgtaaaaagatttattgatcaactcaacaaagtatttcatcttgataaaaatctagattaaacactttaggtatattgacgcttattattaaagaataaatgagttagaaaatttaaatgtatgtataaataaatgaaattaaaatttatttaatatcttttatcgattaattaatttgagataatttttattatattttagattgtcacacttaataaaaacaaaaatgacgatctaaattataaaggttatataaaacctaatgttaaattaaccaaacagtaaaaaatatatttaagataacagcaaggagagttaacaagatggttggactatttcagcatttaggacgtagtgtacaaaaccgccctcacttctttattgctttaatttttggagtagttgttgcaagtttattggcatggctcacttcatggaaatggtctaccattttattagcaagctggaatggctcgatcagtttatatttactccatgtctggaaactgatgagaagtgccgaccattcacaaatgcaacagcaagccaaaaaacaggacgaaagtaaatgggtcattatgctcattgttttattggccatcacaatgagtctggttgcaattttggtacaactttcccagctcccttctgggcattatgaaaagttaggacatgtagcgttagctttactcaccattatttcagcatggcttttcatgcataccgttttcgctttgcattatgcccatgacttttatatggctctatccagaaatgaagagaatggtggattagacttcccgggtaccgaacatccgacctaccctgacttcttatattttagctatattattggcacctcagcacaaaccgccgatgtttcaattaccaacaaacatatgcgtcttttaaacttatttcatgctgtattatcttttggcttcaacacgaccattttagcgatttgtattaacgttgctgctggctttcttaccaactaagacctttatttaaaaacaaaaaagccccatttagagggcttttaagaataactatacttacaacagttggcccatactgctttgttttaagccttcgcgctgtttgatcgtttcaacataacgtgcaatagctgggtgcgattcaatcgttttcatttttaattgccataatagcatggctccaacacttatatctgcagcggtaaattgttcaccacatacatacggatttgcttcactcagtccttgaactaaagcttgataagcatcgttataatcaccataacccacaaacattttttgctcaggtgagatctctattcctaaagctttatcgacaccagcagcttcccaaggacctgccatcataaagagccaacgatagtacaaaccacgtttcggatcatctaaagcaggtgccaaacctttgtcactaaatttgtctgccagatatgcacaaattgcacctaattcataaataacgacatcgccatctaccaatacaggcactttcccaaatgggttaagctttaaatattcgggtgatttcatctcggttcggtatgctacttcaatacgttcacattccacgccaagctcaaccaaaagccagtctataacgacaccacgcgattcattgttagtataaagtttaagactcattcttattgctccttgtttatcgtgattcctagtctacaaataccttttgtcagtttttgtcagtagtcctttgcatttcttgtttccaccatctttgaaacagatgttttttaaattcaggatatatttcctcactcatttgcaagtcatgaatacgatctatccgaaaatggcgaaaggcctgccgtaattcacaccaagcagcaagtacaactttgtcatgtaaataccctaaagcaaaaggccaaagagaacgttgacttatacgcttgtgttcatcgcaataatcgactttgatctttacttgtttacgaatcgctaaacgtacttgttctactaaagcttcatcaaccggatgccagtaatgtgtaacacctagcgtcatatcatcgatcaaatatttccggtgctctggtaaaaccgcataaagtttagaatagattgaaacagctgccgatttcattgcctgatctggaacgtctttcaaccactctaaagctaaaaatagagcctcggcttcattctcattaaaagtaaccggtggtaataaaatgtcttctttaagctgaaaccccaaacctgccgatgcatctattctgacaccttgagcacgtaaactatcaatatcacggtaaatgctgcgaatactaattcccaagcgttcagccaagacttgagcagtaacgggataacgagattcacggagttgctgtaaaagatttaatagacgaatagagcggctcattttttctcttcttattgttctttagttttaaaaataaggaggaataaattcctccttcttacatcattttaaattacgctacgtctacagtagataactttgcatactctcttaaaaagttgtgcagctcaggtacatctttagcaatggttaaaggttggaactgttgtagaacttcgaccgagtgcactccatagcccaccccaatacgaggcatacctaaacgctgagccatttcaaggtcataactactatcaccaatcataactgcctgttcgacacttactccagttacagtcaagatttcttgtaacatgagcgggtctggttttgaacgggtttcattggctgctcgagtaacatcaaacagatgagtactctgtgtttttgcaatcacacggtctaatccacgacggtttttacccgtcgcaactgcaagttttaaaccttgagcttttaagtcatgaagtagttcagaaataccttcaaaccatgcatcatttgtcgagttggcaatatagtgatcgccatatgcttttaaaatcgaatcatgcaaatcaggtacttctggaaataaggtctgcatcacttccggcaaacctaaaccgataatactctttgcggcttcatcagtcagagttaacttatgctcttctgccgcatgctgtaaacttgcaacaatctgaccaacagaattatataaagtaccatcccagtcaaaaatcactaattcggttttcagactcattttgctactctcaaagcctctaataactgggtcatgtcttctggcaacggtgcttcaatcgttgggtaacccggaatatccaaacgcatggcatgtaaacacaaacggcgtgcttcaggccccgtatatgcagtgttgtgcccatatttatcatcgcccaccaacggatgtccaatacttaaaccatgtacacgaatttgatgggtacgccctgataaaggagatgcatgaactaaagtggcatttttaaagcgctctgcaactacccattcggttttacttggcttaccttctttagatacacgtacacgacgttcgccattggctaactcataacgaaataaaggcgcatcaatgagctgtttatcaagactcacctgaccttttacaatcgctgcataggtcttacgaattttgtgttcacgcaacatatcttgtagcagttttaaagtgctacgcttcttactaatcataactaggccagaagtatcgcggtcaatacggtgaatcagttctaaatattttttacctgttgccgcacgtagtgcctcaatcaaaccataagccacgccactaccaccatgtacagcaatacctgatggtttatttacaactaatagaccttcatcttcatagaccacacgacttaataaaccttgagccacactgtcgcttacaggaacagcagtttcatctttttgttcatagcgaataggtgcaacacgaatctggtccccaattgcaagtttggtctcggctttaatacgttttttattcacgcgaacctgaccttcacgaatcaaacgataaattcgactctttggcacaccctttaaacgtgaaaacaggaaattatcgattcgttgtcctgcttgatgctcatccacctcaaaccaagtgacactttgccattgctgtgtagaattcatactaatatttaaacctgaaattttacgaaatttgattaataaatgaccgattagcttagttttttcacaagaaatctaagcttagcccataggcagatgctgcaaggtttgatatagtcagcgcacggataccaccgtaagtgaacatctaaagggaaatttccctgattgaaacctcaatcaaaatgatgctttcatcaccagctcggacaggtcctaaagaattatgccgacgccgaaggcttattatatcggcaaaatgacaaactgttgcgtttaattcagtttgttcaaaaaaatatgttaccaactctagttggttatggaacgtaaactgatacacatcagacaaatcgctccttaatgttgccttcaggctaaagcgttgatgcattggaactgccgaaagcaccgatacgatgagcattccgtatcaaacttccaataaagaagtcacttcgcgcccaatgacagtgaaagtcattaaccaatgcaccgctcacccgccagtgaagcaaaaaggaattccgatttaaaggttgaagcagtattgcctacatcacagacgagaatcgaagctaaggctaaatgtagccggtaacagatgactcagaccacaagtattttgagatctgggaaatgatccgtcatgttcgatgttcgttcagaacctttaagtttgtttggtttgtttgtgtgagtcactattaggtgtcacacccatgaaacgtatgttgattaatgcaactcatgccgaagaagttcgcgttgcacttatcactggtaatcgtctttacgattttgatttagagaatcgtacccgagaacagaaaaaatccaatatctataaaggccatgtcacccgcgtagaaccatctttagaagctgtttttgttgaatatggcgcaggtcgtcaaggcttcttgtctatgcgtgaaattgcgaatagctattttcaggcagacccacgtcaaacttcaaacattcgtgaacttattactgaaggcacagagcttttagttcaggttgaaaaagaagaacgtggtaataaaggtgcagcactttctacgtttatttcccttgcaggccgttatttagttcttatgccaaataacccgaaaggtggtggtattagccgtcaaatttcaggttcagtacgtgaagaattaaaagaaattttagcttctttaaatgtacctcgtggtatgagcgttattgttcgtactgccggtattggccgtactcaagaagaattacagctcgatttacaacacttgcttgacctttgggcacaaatccaaggtacagcgagctcaggcccttctccgatgcttgttcatcaagaagcgggggtagtaacacgtgcaattcgtgattacttacgtgatgacgttgctgaaatcttaattgatagcgaacaagcttataacgaagcatataactttgttaaagcagtgatgcctcgtcaattagacaaattaaaaacttatactttaaacgagccattgtttgctcattttggtattgaaagccaaattcaaactgcttacgagcgtgaagtaaaacttccttctggcggttcaattgtgattgaccagaccgaagctttagtttcaatcgatattaactctgcgaaatcaactcgcggtcatgatgttgaagaaactgcactgaacaccaaccttgaagcagcagaagaaattgctcgccagcttcgtttacgtgacattggcggtttagtagttatcgactttatcgatatgactaaagaacgcaatcaacgtatggttgaagcaaaacttcgtgaagcaacacaaagcgatcgtgcccgtatccagttcggtcaattgtctcgttttggcttaatggaaatgagccgtcaacgcttacgcccatcgcttgaagaagcaacaggttatgtatgccctcgctgtcatggtacaggcatggttcgtgacttacgttcgctttctctttcaattatgcgtaaagttgaagagattgcacttcgtgaacgtcatggtgaagttcaggttgaagttccagttgaaatcgcagccttcttgcttaatgaaaaacgccatagtctagtgtatttagagcaaacttctggtgtacgtgtgactgtattgccacacccgcacttagaaactccacattacgaaattgcatataacccagatggctttgctccatctagctatgaacgtacagaagcaacccgttctagcgagaaagagttaggttatgagtcttctgaatggcatttagaagaagcagatcatggccatgctcatgtaactgctacagcttcaactcatgctgcggctcagaaaaaagcaaatcatgcaactcaacctgtagcacaaccttctgctcaaaaagcagcaagcccttgtgcatggttagaaaacctgtttgttcaaaaacaagcgcaaacagttgaccaatctcgttcagcacaaaatgctgctgctgcgattgagcaaatggtgaatacaggcgcagtaagccgcggacagttcggtcaagtagccgtacctgctgttgcagaagttgcgccagttcaatcaaataatgcttatatttcacagtcacctgtgaaacaagacgttcgtgaacatgttgaaaaagatgataaatctcagcaacaacgtcagaacaacaaaaagcgtaaacataaagagcaacgtgaacaacatcaccaatcacatgaacagcaacatcaagttcatgaagaagtggttcaattgtcacgccaagaacaacgtgagttaaaacgtcagcaaaaacgtcaacagcagcaagatcagcaacatcaaaataatgatgtacaacacactgaaaatgctgtgccacgccgtgaccgtaataatcaacaacgtccaaaccgtccaaatcgccaccgcgatccaagtgtattaaatgaaaatcaaaatacaccggttgttattgatgaaaaacaaattaaggttgatgtgattgatgcacctaagcatgatgtcatgaacactgctttaatcatcaatgttgatcaaggtcaaagtgagattgttgcacttacgcctgagcatcgtcacgttgagcgagttgaaacgacttctactgaagttgctcaagagccaactccagctcctgttgtagccgagaaagctgctgtagttgaaaccaaagaagaagctcagccaagccaagaagctgctcagccacaaatcaaacgtgctagcaatgaccctcgtatgcgtcgtcgtcagcaacgtgaggctaaacacgctaaggcagctacgccatctattgcgccatcgcaaattccaactttggcacaacacacaatcggtagtttaatccgtcatgtgtatggtgaagattgcaccgtattgattgaacaatttggtctagtcccaacgtttaatcgtgctttgcagaaatttgcagaacagtacgcaagtacgttagtagttgaagttactgctgaaacggaagagaaaaagccggtaactcgtgatgcagaacttccaagccacaaaccggctgaagaagcagaacctgcaccagtacttccgcttactccgccgcaagcaccagctccacgtgttgcaaatgacccgcgtgagcgtcgtcgtttagcaaaacttgctgcggaacaagcatttgagcaagtgaaacaacaacattctgctcaagaagaagttgctactcctgctcctgtagcagaagaaaccgttgctgctccaactgctgaaacacaagcaacagttgaaccagcacaacaaccgcttgaacttaatcagtcaactgaagtggtacaacctgaagctgctcctgcagaggaaaaagctacagaagaaacagtagctgaagctcctgcagcgaaggaacctgcgccatcaaaagcagcaagcaaagcaaaagcagcggctgaagaaacagtagctccgactgaagcaacaactgatgccgaatcagaagacgttaaggcagataaggacaaaccgagccgccctcgtcgccctcgtggccgtccgccaaaaaaagctaatcctgtagctgagtaagccatttgctcaattgcagctaatttaaacaaacctagtcatttcgatgactaggttttttttgttatttttagccaattaggttgattgcactagaagaaaagttttaaaagcatggtgaaccatgaaaactattggactttttgcccacacaaccttttttggattgatcgaaaaataaataggattgatatgagccagacaacacagaccgatatcattacgcttggtgatgttgccacaagacttcctagcttcattcccaaagtaccccatatcctaaatggtcttaaacaggcttatttaagaacatcaaatactccaacaggtttgggtattgcttttgaaaaagctgttaaaagaaatccgaaaggcacggcattattatttgaagatcaaagttattcttatgaagctttaaatgaatgggcaaaccagatttcccattattatctttctctcggagcgcgtaaaggggacgtcattgctgtaatgattgaaaaccgctctgagctgattgcaacaattgttggtttagccaaaattggtgtgacaattgcacttgtaaatacatctcaagtcggtaaggttctcgctcatagcatcaatcttgtaaaacctattgccgttattgctggtgaagaagtccgagctgctattgatgaaattcgtcaggacttaaatgtacctaaagaccgcttccactggttcgcagatcaggcaacacgtcaaaactcgggtacagcgcctgaaggctatgtcaatcttgcggaccaaattgatcaatttccaaaattcaatccgtctactacccgctctgtcactggtaacgatggtctgttctatatctacacatcaggtacaacaggtttaccaaaggcggttattttcaagcacagtcgctggacattagcgtatggcacctatggtcatatcttaaacttaggaccagatgacgtcatgtacgtgaccttaccgctttaccatgcaacaggcgtggtggtttgctggtgtggcgttatcgcaggcagtgcaacacttgcgattcgacgtaaatattcgactagcgcattctggaaagatgttcaaaaatttaatgcgtctgccattggttatgttggtgaactttgccgctacttgatggatgctcctgtcaccgagcttgaccgcaaccatcgtgtaaccaaaatgattggtaatggtatgcgcccaaatatctgggacaagttcaaacaacgctttggtgttaaagaagtacttgagctttatgcatcgagtgaaggcaatgttggatttagtaatattttcaactttgacaatacggttggcttctctcctactccatatgccattatccaattcgataaagagaaaaacgagccagtacgcgataaaaatggctggtgccagaaagtaaaagcaggtgaagttggcctactcatcgggaaaattaccagccgctcgccatttgatggttacactgaccctgaaaagaacaagtctgtgatctggaaagatgttttcaagaaaggtgattcttatttcaacacaggtgatttggtccgtgacatcggcttccgtcatgcccagtttgttgaccgtctaggtgatactttccgatggaaaggtgaaaatgtatcaacgactgaagttgaaaatatggtgtgcgaatacgacaaaattgccgaagctgtcgtttatggggtagaaattccaaataccaatggccgtgccggtatggcagcgatcactctcgcagatggtgaagagctaaatgatgctgatttaaccgaaatggtgaccgtatttaagaaatgtttacctacctatgcagtacctgtatttttacgtgtacaaaaaaaggtcgaaacaacaggtacatttaaatatcagaagaataaactgaaggaagaagcgtttaatccaagcaaaacttctgaacgtttactcgctttattacctggtgcaagcagttattgtgatatcacaactgaaatttttgacaatattcaggcgtataaataccgtttttagtttattttttagctaaacaagaggaaatcgtgctttttataagcaatcatgcaaatgtttttaaatttcctcttgtgttagttgaataacttgctaaaatacgcgacatcaaaacgatacagtgtttagaagtgttacttctctctgagtcagttcgagtttgattgctaaagaaaattatagattttctcctgcattcaagtaaaacaaggttttacttaattctcgctcagggtcgttagctcagttggtagagcagcggacttttaatccgttggtcccgcgttcgagtcgcggacgacccaccacttattagttttgaacctatttgggtcgttagctcagttggtagagcagcggacttttaatccgttggtcccgcgttcgagtcgcggacgacccaccaaattctaaaaagcctctcagttcgagaggctttttttattgttatcctattttctttttatgactaaaagatgacgatacatttgcgatttaaaacttcccccacccaattcataaaaacttctagtcgctttggaatataactcctgttgggatacaaaatattaagtggaagcgatggtgcactgtaagcactcagcacctcaactaaaatcccctgttcaattttatcctgaacatcataataaggaagttgaataattcccaaacctgcacaagcagcggcgatataggcctcggtattgttcacacttaaagcactatccatcatcacaattccaccttgatatataaattctccctgcttttctcctacagctcctgcgtaattaattaatttatgctgttcaagatcatttaactgctcaggaacaccataatcttgtaaatattgcggactggcacaattcaccatcactaaatgaccaataaatcttgcaattaaactgctgttatctagctctcctacccgaacaacacagtcaattcccttttcaattaagtcagtcaggtcatcagaactattgagctgtaaatgaatatccggataacgatgataaaaatcaggcagctcaggaataatcacttgatgcacaatccggctaggcatcgaaatctttaatgtgcccctataatgctgtttttgtgtctggatcaactgttctaattgttcataatcaaacaacaggttttggcattctggcaatattcgttggccatcttgagtaagactgactttacgggtagtacgatgaaataagcgtactccatagtgagtttctaactgttgaatggcactcgttactgtcgagcgaggtaaatcaagctgatttgctacctcactaaagctttgtcgtttagcgacttctgtaaaaatataaaattgctgcaaccgatccattttaattgttcgtattttctgaatagttaaaccaaactagcataattgatcacaaattagtgccaatctagacttaaaaacactaaaacaagtcatcataggaacaatcatcatgacaactcatagcctcaaagataaagttgtattgattactggcggtgctaaaaacctaggcggactcattagtcgtaaatttgcagaacagggtgcaaaactcgcaattcattataatagttcggaaactcaggcagatgcagagcagaccttagcagatgttaaagcattgggtgcagatgcaattctaattcaggcagatctaactcatattgaaaatattgaaaaactgtttatagatacgaaacaacattttggtggtatcgatattgcgattaataccgtcggaaaagtccttaaaaaaccgtttttagaaaccaccgaacaagagtttgatagcatgagtgatatcaactcaaaaattgcctatttctttattcaatcggcgggtcgacatttaaataacggcggaaaaatctgttccatcgtaacttctcttcttgcagcttacacagggttctattcaacctatgaaggtttaaaagcacctgttgagcattacacccgcgctgcatcgaaagaatttggagatcgccaaatttctgtgactgctgttgcaccgggaccaatggacacaccattcttttatggtcaagagtctgccgaagcagtcgcttaccataaatcagcttcagctttaggtgggcttactaaaattgaagatattgaacctctagttcgcttcttagtcaccgacggttggtggattacaggtcagacgattttcgcaaatggtggttataccacccgctaaaattacaaaagccgtatctcatcgtgcggcttttctttataatgcattgattataagaactcttcgagtaccgagtttaagaaaatatgcccctgctctgtacaagccaaacgatcgctatcctctaccaataactctctcgaacgcaatgaagtaagcagatcatttaaatcatctaaacttaagcctgtacgctgttcatataactcagcttttaccccatcatttaaacgtaaagcgttcatcataaactcaaaaggtagttcatctgcttcaatctttttcatttgcaaatgttcggctggaaccttagccaaatagtctttcggtaaacgagtcttttgaaaacgatatacaccatctggtcgggttactttgccatgtgctcctgcaccaatcgcaagataatcaccaaattgccaataatttaaattatgagctgaaggctgctctttacgccaagctgacacttcataattgataaagccatttgcttttagataggcttcaccttgctcttgaatatcttctaacacctcatcttgaggtaaaacaggttgtgttcggaaaaatacagtatttggttcaatggtcagttgataccagctgatatgtgttgcaccctgctctacagccgtctttaaatcataaagtgcttgctctagtgtttgttctggcaagccatgcatcaaatcgacattaactcgcttaaaacctgcttgtcgtgcctgctcaattgcatccatagcattgttggctgaatgaatacgcccaagcttttgcaggtgatcggtattaaaagtctgtacaccaatcgataaacgattaattcctgcttctaaatagcctgcaaacgggtcatgttctagtgttcccggattagcttctaaagtaatttcacagtcatcttcaaagttaagcagcgatttaagctgttcaaatagccatgcataacctttagcagaaataagtgaaggtgttccaccaccaataaatacactgtgaattgaacgtccttgtgccatctcgacttgagtttcaaagtcggctaccaatgcttttaaataagtttgctcgagttctgccgaaagcgcaccatcaggcaccgcatgtgagttaaagtcgcaatagggacatttacgcacgcaccaaggcatgtggatatataaagataaaggaacagaagcaggatttaatacggccaaggaacagggtccaatttacacaatatttctattttaacatgactgcatcaatgggcttatgaaaacataccttaattgctttagactgtttttaaacatacttaaatattgataaaaatgatgaaattctctagtcaacttttcctgatcttacccttagctatgggaatcggtgttgccatggcttttcagactgcaattaatgctcagcttcgtgagcaattacactcacctttgcaagcagcattgttatcatttttcataggtactatcgtcttagccattatggtgttcttccaaagtgccgagaaaccgagtttaagtgaaatatccaatattccatggcttctctggaccggaggatttcttggggtttatgcaattagcatgagcatttatactgcacctaagcttggttttttaacctttacagggttagtcgtttttgggcaattggtcatttctatgttacttgaccattttggctggttaggtaccgaaaagacacctgttacatggcaacggtttctaggtggagtggtcatctttgttggtgtattacttaccttgcaacgctagtttcattttttatatttataaagagtaccttttgtgtcgaatgtcacgtcgtttcggtctgaattaaaacaactcttccatttaatgttacctattttaattacgcagtttgctcaagcagggttcgggttaattgataccattatggctgggcatttatctgctgcagacttagccgcgattgcggtaggtgtaggcttatggattccagtcatgctcttgttcagtggtatcatgattgcaaccacaccattagtggctgaagcaaaaggcgctagaaatacagaacaaattccagtgattgtccgccaatcattatgggttgcagtaattctaggggtattggcaatgctcattttgcagcttatgccatttttcttacatgtgtttggcgtaccagaaagtttacaacctaaagccagtttattcttacatgcaattggtttgggtatgcccgctgtaaccatgtatgcagcgctccgaggctattccgaagcattaggccatccccgccctgtcacggtcattagcttactagccttagtggttttaatcccgcttaacatgatttttatgtatggcttaggaccaatacctgctttgggtagcgcaggctgtggttttgcaacatctattttacagtggctgatgctcattacgttagcaggctatatttataaggcttcggcttatcgaaacacatctatttttagcagattcgataaaattaacctgacttgggttaaaagaattttacagcttggcctgccaattggtttagctgtgttttttgaagtgagtatttttagtacaggggcattggtccttagccctctaggagaagtctttattgccgcacaccaagtagcgatttcagtcacttcggtattatttatgattccactttctcttgccattgctttaactattcgcgtggggacgtattatggtgaaaagaactgggcttccatgtaccaagtacaaaaaattggtctaagcacagcagtattttttgctctattgaccatgtcttttattgctctaggccgtgaacaaattgtctcggtttatactcaagatataaatgttgtgccggttgccatgtatttgctctggtttgcaatggcatatcaattaatggatgccctacaagttagcgctgccggctgtttaagaggtatgcaagatactcaggcaccgatgtggatcactttaatggcatattgggtaattgcttttccaatcggtctttatttagcgcgttataccgattggggcgtagctggtgtgtggttaggtttaattattggtttaagtattgcctgtgttttattgctctcacgactctatttgaataccaaacgtttaagtcaaacctaataaaaaagccgatgaaacatcggctttttttattttatgcagactttgcccgtgggcttgctccaatttgccagacaaaaggtaaatccgtacggtttacttcccaatctccaattactttttctttgtaaataagcggattatgtgaagccacagtccgagcattacgccagaaacggtcaagttgtttcacttggctactcgccgatgcccctaaggcattaaataactggcttgttaaatcgagtactagattagaaatcaccacctgcccttgtgccgactcaagctcggcatctacattgaattgatgctctttcacttcggattcggcaaaatgactttcataggctttttgcagtgcctcagcggtttttaacgtaattgcttcacttgcatacgcttgagctgaggctttgccgaccacttgtaaaacttgtgggtcgtgacgaaccaagtcaccattaccatgactaaaaatacgtttacgttcacgaatttcctgactaaacgtctcaaccgcggcacgcgcaatacccgttaaagttgcaagatgcaccacctgataaaaagcggtctgatatttaaaacgttggtcaaatggaataaggtgtgaagctggcaaatgaacctgatgtacttttaaagtaccactgcccgttgtcttttgaccaaaaccatcccagtcatcaatcacgctcacccctgtttcatggcggtaaatagcagcaatcacatgacggtcatttacttcatcgtaagcaaataaatcaatccagtctgcaaaaatacttcctgttgaatagtacttttcaccatttaccaccaagttacccgaagcgtctttggtgacacgtgtaacgacatcaccaatctgtacgtttccaacttctgtccacgcattcccgactaaatcaccttgtacaaagcgctgaaaccagacttcctgagaatgctctttatgagcaaccaagcggtcttcaacaaatgcaaaatgacctcgtaaagcttgcacaatattggaatcagcttctgctaactctgccaaaagctggaacagttgaggtaatgaaaccccatctccaccatatttacggggtattcgtacagcgcccaacttggcttcttttaaccactgaatcggctcaaaaggcaagattcgctctttttcccgttgaattgcaccttgtgcaattttttcgaaaatgggacggaatctgtttgcaaccttttcgtaatcagcaccgaccgacagttcttctaattcaatttgagctgttgtcatcgttattctcctaattttgttttttctttcaatttagctccatgcatgacgaggtggctgaaccccattgagataatagttaccaacaatgtgatatttccaacgcacagggtcatgcaaagtgtgggtacgggcattgcgccagtgacggtcaaggttgagttcagataaagtagaacgcgtacccgataactcaaaaagtttattggctgccaaaatagcaatttctgtggtgagtacttttgcctcggcaaccaatagagtggcttggtttacatgttcttcggtggtgttggcaatggcctgatcaattgcatctccagccaaatccaataccgcttctgctgcacgcagtttgatttttaggtcaccaatatttgcaatggtgtaagggtcatcactggctttttctagacctgaatcaatccatgcacggctatggtttttaacatattgaatcgtttcttcaattgcaccacgtgcaataccggcatcgaccgcagcctgaataaactgagaaatagcacctgctggtgttgggcgctcaaatgcttggtaaattggaactagatattcttcacgtactggcacctgattcagctctaccgtgccgctagctgtagtacgttgtccaaaaccagaccagtcattaataatattgaccccagatgtttcacgtggcacaagtgcagcataaggttgcccttgttcatttatagcaacaattggaatccaatgtgcgagcaaggcacccgttgcaaagaatttcttgccattaatttcataaccatgctcggtcttttgaagtttagtcgtgaggtccgcgactgtcttactgtgtttttcggaaaatgcattgccaaaacgaattcctcttaacaccaagttaaagaagaactgttgctgttcaggtttcgcatctagtcttaaatgttcaataaaagccaagtggttttgaggcaactgagcaagagaagggtcaacgctcgcaattgttttgatcacttccgctaaagttcggtacttgacttgcgccccaccaaattgcttaggtactgtaatggcccacaggccactttgtgagaactgttgaatttcatttaagggtaaacggcgctctctatctcgatctgatgcttcttgggcaaactcttgagcaagttgcttggcaatctctattgcctcttcatcagaacgaataatatgtgcgtcttttgactgctcgaatacagataaaggaaccgcttgagagcgcccataggacgaatttagactggtcataagttttattgtctctatttcttatttaacatgcccttcaccttagcactaaaaaaacagcgactttatagatattaaagctttgtttatgaaatgaatcttcaaaagcttttcatattttttactataaaaataacattttgtttttcgaaaattttcttacaggagataaacaatttcttataggctttttaagttttgtcacctatgatcaaacctaggcaatattatgttgtagtcaatgaggtatcgaagatatggcaaagaatgcaagttcacctggcaaacgatttatgaaacttgcaggaatgaccgcgagcattgcaacaaaaaccgtttctaactcgattcgaaacctgactgcggatgaagaacagaaactggctgcaaaaacaaaattatttcaagatatcggacttcaaattgcagacaccttgggagaaatgaaaggtgcggtcatgaaggtcgggcaaattgcatcgcaatataaagacatcttcccgcccgaagtcgccaaagcgatatcaaaactacaacgccaagctccagctatgccttttgcagcgattcagcaacaagttgaacgtgagcttggcaaaccgctgaatgttgcctttaaatcttttgaacaagaaccttttgctgctgcatcgattgggcaagttcacaaagctgttctgccaagtggcgaacaagttgtggttaaagttcaatatcccggtgttgatgaagcctgtgaaagtgacttaaaacaagtacgtttagcccttcgcttaatgggtgtacttaaaattgataaaaagttgcaagatcagctttttgcagagattcaagatagtctgtcagcagagcttaactatgaaattgaggctcaaaatcttgaggtctttaaaacttttcatagtaaattagacgacaaaattattatcccgactgtttataaagattactcttcaagacgaattttgactttaagccttgaacaaggtgacagcattgaaactgcgagttcttggcctatcgaaattcgaaacacaattggccgtcgtttaatccgcgctttgggtcaggaaatgttctttttaaaacgttttcactgtgaccctcacccaggtaactttgccttccgccaagatggtagtgtcattatttatgactatggcagtgttaaaacactttccaatgaaattgtgtatagtttcaaacgattagtgaatgcagctcgccatgaagatatcgacttaattgaaacagaattactcgaactacattcactagcagaaaaaggtaaattcccgagcgatctttataaactctggattgaagtgttgttgcgtccacttaccacaacctatgattttgcagagaattcatcccatcatgatggcatgttactcgtgaaaaagtctttaaaatattgggatgtctttaaaccttcaccagatacattaatggttaatagaaccatttcaggacactactggaacctcattcacttaaaagtacatgacaatctaaacgatctatttgaagagctggttccaccttctaactaacttaatttacttatcaatgtagccttttagggttacattgacttattaattgttatgttataacatttctttaatcaaaaataatttaggacaatttctcatgcgtaaagatattcatcctgcttaccaacaagtgttatttcatgacaccaatgcagacgtgtacttcttaattggtagtaccattcagactaaacaaaccaaagaatatcaaggacaagtctatccttatgtgactcttgatatttcaagtgcatcacacccgttctacacaggtgaagtacgtcaagcaagtaatgaagggcgtgttgcaagctttaacaaacgcttcgctcgctttaatcgtaagagttaatcttacgttaagttttaaccaatacacttaaaccattggaagcctaagactcatctcctccacttaggcttctttttttatgtgcattttttaatgattttctaaggtgtgtataaagttaaacttatccacaattttcacaagaacgcttctgatttttctcaacaacccatcattttttatagctctcaagctttcaaaacatgtattcaatgctatgcttaagccccatttgataggaagtttaaaattatggcacaagagttacttgcccaattacaagcaggcacagcaaaattttcagatgttttagcttatattgaagcacgctaccaacatactccaacagcttttcaaaatggcgcacagcataacgctgcaactgaaaatcaaggcagtgcgaaagttttctcttttgccaagttacaaggtttagaccaagcacaaactttaagtttatttgcagagcactacgcatctgtattggctaccccagagggaactgaccaccaaaatattcgtcagtttatgcaaaatggttgggatggtgtgaagtttgaaggtcaagctttaactgaaaagtaattaagaatttgtgaatacacgagggagtcttaccgtttattctcaaatgaaagtagctaattctgttactttggttttgcccaaagtaaccaaaggcatttgtcatcaacagaacctgttccctgtttacacttatcaactatcttgcaaaaacaagatatagctgatttcagtcaggctgttgatgactttaacgcgtatcaaatcccaaaaataaatcagaagtttttaattcgtcatttactatcgtgacaagcggcatggatgccgctgttttgctgtgctacatggatgtagtatcagcgaaacagaagatttttgcttacttttgatctttcaaaagtaaggtatgcctatacaaatgctctttgagaatatcgtaaaacggaggccgtgccgtatatctcgttccttaaacatcccaataatcagttgcccgctacccaataataagtcgccaaccccaaacacgtaaaaattaacgacccaattaaatgaatagaaatagccaacatcgccattccccacttaccactttgcaataaggtgacgatctcaattgagaaagttgagaatgtagttaaagcaccacaaaaacctgtgattacgaaaagtttatagttcggacttaaatcactatgagcaaaataagccatcgcaaaaccaataataaagccaccggccaaattaacagtaacagtacccaacggaatttgcggataaatcgggttgagttttaaacctaaaagccaacgcaaccacgccccgagcactgaacctaaggcaattgaaagtaaaggataatacataggaccatccctttagtgagatgctaaaagagcaaacaaaaatgatgggaaacgtgacatggcgcactccaaaaataagcagagtacgcaataacctacgtacccagcgctataaatacatgagggtaacgtaggcatcattagccaatacggcggtttttcaagggaggaatgccatctccctgttttaggtatattaaatcatctaagatttgattaaaacatactttttaaatcatggacgttcatcgtattgcggtaaatcgtcatggatacattcccactctgcctttgaagcagcaaaaatatgcatagtcggtttttggtctaatggtgtatctagagtcccaattcttaaacgatacagttcaggctgagcatcacgcgagctaataagcggtgaaccacattcgctacaaaaccaacggtacacaccattcacagcaaattttttgacaaggtcttcaccttgcgtaattttaaaatctgcactgttgataggagcattcgttgcaaatgctgttccattggattttcggcagcgttgacaatggcattggataatatctccgatatcgcctttaatttcatagcgaataccctgacataaacaacttccctgatagactggcgatgcttgagacatacaattccgactcctattattattggtcgctcaaaaataacacttttcacatatcaaacatagcaccgaattcgttgttatttctctaagaatgaatgcacaccttcaccagctgctcgtcccgtagcaaagcatgctgtcagcaaatatccccctgtaggagcatcccaatctagcatttcgccacagcaaaaaactcctgaagtttgtttcagctctaaacgttctgttaatgcatcttgcttaacaccaccagcacagctaatcgattcttcaataggcctaaagccatctaacttaatttgaagtgctttcattttttgcgccatcgtctctggttgactccatagtgctttatcaaccacttctctaattaagttaattttagctgtgtctaagcctgctttacgccagatattggtgagagattgttttttgctagcctgtaactttttaactaactgtgtaagctctacatcaggcaataaatctaaaaatagatttaagctttttccttgtttttgttgttctcgtaaggcgcgtccgagtttataaatgaccccactttctaaaccgtagtgagtaatcacaatatcaccatgagtaacttggctgggttcaacccacgcattgatacgctttaaaggctcaccaaaacagctttccataaaagctgaccaagtatgcaatacccctgcattacttgcttgaaaaggttcaatactagattgatccatccattgttgccaagcaccatcactgcccaattgagaccaagatacagccccacaagccaacacaaccgcatcgtattgttgggtaaaggtttcagtattctgtttattttggttttcaaaagtcactgttgtaccatgcaaattaatacaacgatgacgataaaagaatttaacctgctgttctgctaaacgttttaaccaagcgcgaagtaaaggagcagctttcatttcaacaggaaaaatacgaccggaactacccacatacgagtctattcccaatcctttcatccagttctgaatccagactgcatcccatttttcaacccacggtttgagccattctgcatggtcataacgttcaatgaactggggtaatggttcagcatgcgagatatttagccctgttttaccagccatcagaaacttacgcgcagccgaaggtttttgctcaaacacatcaatttcataagcatactgactcagtacctcagctgccattaacccagccggacccgcaccaataatggcaatctgcttattcgacatgtgtttgcccttgtagcggtgcaaactcatcaaaacgagttttataaccttcaggcttagtcataatgagctgctgacaaagctcaccacgctctaaatatttaatttcaaaatgggtacgtgcagaggtttgagcaattttttctttttggtaaggcagcttccacacatttaataactgttgttcagcttcttcaatatattcaggaatattacttgccaaagtaatggttccacctgttttcagacgtgatagcaggaactcaaaaaatggcatgttcaaccagcgttgtgccggattatgaggttctgggttcggatagaggataaagaaatgttctacttgagcaggatatagagcatgtacaacccaaggtaaagcatctgcatgtacaggcaccaagttgtctcgtggttccaaaccatgctgcttttgcatggccaagaatttttctctagttcgttcaattgcatataacgtgtgctgaggattttgcccactaaatagcaaagcatgtttacctttgcctgccccaatttccacacaaatcggagtattttcaattggggtaaaatcgcgaggcgcttgcatacgttgtgcttgaaattgacgaatctgcataatcacatcaaactaaataaaaatcggcacaagtctaacaagtcacctgacttttgcctaatctatttctcttcactttgaggttactgctttatgccacgtacatttccctgcccacgctgtggtgaaccaagtgtttgggaaggtaatgaatttcgcccgttttgttctgaacgttgcaaacttattgatttaggcgcttgggcaaacgatgaatatagactgcctacccaagatgctcctcagcaagacaagggtagtcagcatgaagatgattatgaggattaacccgctttacttgcgacaaacgggttaaattgtttttcatagccaatggtactcattggtccatgccctgaaataaactgggtttcatctggtaagctaaaacactcacgctgaattgattcaatcagttgatcatgattaccacgtggaaaatctgttcttccaattgagcctttaaacaggacatcgccagtccagagtaaaccatgattcttgttatagaacatgacatgacctggtgtatgtcctggtgcaaaacgcacttcaaactcatcttcacccagttttagcacttcaccgccttcaagccattgatcgacttttacaggctgtgggattggaaaaccataacgggccgaaacttcctgaatcatatctagccagaactgatcttctttatgcggaccaacaacaggaacactccactcttttgcgagttcacctacagccccagcgtgatctaaatgcccatgagtaagccataacgcttttacttttaaacctaaggcttctacttctttcttcaaaacagcagcatcaccgcctgcatcaatcaaaactgcttcttttgtttcactgtcccaaactaaagaacaattttgagcaaaagcagtaactggaacaattttgacttgcagcataagaacctctggctaaaacgcaattaacggtgggctaaggtatgggtaagggcatcaagattagcctgaactaaacctgcaagcaaatcaatatgcgcttgatcactgtttaaagcaggaatgtaagcatagcttccgccaccagcttgctgaaataactcagcattttgaatagcgagctcttcaagcgtttccaagcagtcagcagaaaaagctgggcttaagacctgaacagacttaacgccctgcttcgcccaatcttgtaaaagttgatcagtataaggtttcacccattcttgtttgccaaaacgtgattggaaactaattgcccattcatcatcttttaaatgcaaagcttcagcgactaactttgcggtaatacgacaacggtccgcataagggtcgcctttatctgcataaggctgtggaataccatgaaatgacatcaacagcttttcaggtttgccatgttgctcttggtaagctagaacactttctgccaacgcctgaataaacattggatgttgataataatctttaataatggtcagacccggcaaatttcgctgagtaggaatccacttagcaaatgcgtcgtataacggtgctgtagaagtggctgaatattgaggaaataaaggcaataaaatgacatgctcttgcggattagtcgccagtttttctaaaactgcatcaatacccggattaccataagtcatagcgggcaacacagttaaatcaaactgtttattttcacgctctaaataagcctgcacacgttgagtttgctcaaatacaatttcacgcattggtgagtcggtagaccataccgaagcataggcatgtgctactctttttgggcgaaaaggcaaaacaaacagatttaaaataatccaccaaatgaattttggaatttcaattacacgtggatcagataaaaactgctttaaaaaacggcgcaccgctgggacggttgcctcatccggtgtgcctaaattcgctaaaatgacagtaactttcggtttttgttcaaacgacatgtgtaaatgcctttcaattcatcttatgacactaatgtaacagctttcatggtcatatctaaattgaatcgctctaagcttttaatcgagtactccgatgattccatttataactgagcaagagcttttgggctttggtcgttactttccataaactatgttgttgatcaatcttggttggaacaatccagccttgtgattgcatttgctttttaatacgaaacagggctttatgattaatttgtgcacctgccactgcatgtgctctaggcaactcttggcgagcgtcttctaacccgtcctgatttaaatactcattgaggcaagtcccaaagttctcttctggcatggctgtctcaaaatgtttagccaaaatacttaacagttgagaccaagtcatttgtctctggcgcttaagctctttaaagttgccatcttgaaaagcctgaatttgatattcaaaagcaaaaacatcttgcggtgccacttcatttgcttgaattgatgactctgataactgttgttctaattgtaaaattttactttttaatcgattaatttcatcttccaaatgatgcgcttggcgtgcaggcacccaaccttgtcccatatattgttcaaccattaaaggcatatttaaacggacagcaagttctaaatcacgtgggcttttaaaataaaaaatatgattcgcttcatgtaataacttttttcggaatgccagaaatttctctttaagctgcggatgagtctcttgtaaatgcatatcacgactttcaggttgttcatgcataaagacgacaatgggcttcgcccgacttaacgcatattcatactctaaagaaaaataactcgcccctgaaattgattgctccccatactgactacccagcagcaaaacaacataatccgattcatcaatttgccgacgggcaagtgtcgttgttagaggatttctatattctaacccccaagcaaaaaatcccatattgactaaagtttgggaaagaaccatacgctcaggttgcatctcgcgacctgaggttgaaataaaaatctgatagcgtgtatcgagcatagcaatacccttatcgccccataatcttgatatggcctgaatcagccaagattatgaaccgccccaaataagaaaaataaatataaaaaaacgctttcttctgaatgcctacaacagagctcaactcagattgtgcagcgtccatgtcaattcttgtggaatcatattttgtaaaacaggttgtaatgcatctgcattattaccacttacataacattcaatacgtgcaacattctgacgcatttggtcacataataactcattttttattaaaatacgggctgtttgtcgggcaactgccaatcccgaatcaaccagtgtgaattggttatcaaaaagataatgaatggcttcatttaaaaaaggatagtgcgtacaaccaagtaccaaatagtccgcgccttgctcaactgcaggttgtaaaacttctcttaatgcatttaaacaagcagggctcatttgctgccctgcttctacacaagggacaagctctaaactcgttagagtcatcactttaacacccgctggaacagcaaacttttcgacaacatccttaatgagttgtccacgaaaagtagctggtgtcgccaatactgcaaccactttagaacgagtttgtaatactgcaggttttagtgccggtaccaagccaacaatcgggaagtgttcgccataatgttctcgtaaatgatcaaggctaaatgcggaagccgtattacaagctacgaccgcaattttacaaccctgacgatataaccagtcgacggcacgagccgttagctctctgatttcttcatcagagcgaggaccatacggaacataggctgtatctgcataatacacaatacgttcgtttggcaaatatttggcaatttctgctgcaaccgacatacctccaatacctgaatcaaaaataccaattggggcatctgctaatgctttaggcataggttctaattcagtaaataaaggctgtatggctgtcatggcagtactagagagtgtcggaaaatttcactctataaagcttaaacctcaagtgcctaattgcaagtgcaaattaccactttttaactgcaaaatggtttcgcctttatcattttcgaccagtgttccatagttcacgagatgatagaaagcctgacgttgaataagcgcattaataccaaatcgaacatggacataaggacgcaactcccctgcatattcccgcataaaaatcgggtgttctgcatcaactaaaatcacatcctgattggtcgtcgtcagttgtagaaactcatcacctgaaatttcaatctgatctacctgattgactaataaaggttcatcttcaacttcgatttcaatttgttctacaggggttttcaggtagaatttaccctcttctttccataggactttggtaaacaaatccaatagggcttggcgcttgattaattgaccttcgtgccaccattctccattggctttcaccgttaaatccattttaccgcaatgctttggatgccattgctctaaaggtgggattgaccttttgtgactttgctgtacaccttttaagtattgtgcaatgttcattaagtttttatcatcagataacggtatttttcccatatccgatggggaattattttgatttaccatagtttatgccttgctgacgaaaaaatatgacgactcagccaattggctagatcatggtttaaaactatactagcccaaacgataaaaggcacaatagcatatttgcgcctatggattaaaacactcacggcagcaccggatgatctgacattacggttgccacctttaagtattgaggagtcctacatggaacacatcgaacgtgaatcgatggagtttgacgttgtcatcgtaggtgcaggacctgcaggtctatctgctgcgattaagatccgtcaattagcgattgaaaataacttacccgatctttcagtttgtgtagttgaaaaaggctctgaagtaggtgcgcatatcttatctggtgctgtacttgaaccgcgtgctattaatgaacttttcccgaactggaaagaagaaggcgcgcctcttaacgtacctgtaactgaagacaaaacattcttcttgctttcagaaactacctctaaagaagcacctcactggatggttcctaaaaccatgcacaatgacgggaactatgttatctcgctaggtaacgttgttcgctggttaggtcaaaaagctgaagaattagaagtttctatcttccctggctttgctgcatctgaagtgctttaccatgaagacggtactgtaaaaggtattcaaactggtgacatgggtattggtaaagatggcgagcctacacataactttactccgggttatgaacttcacgctaaatacactctctttgctgaaggctgccgtggccacttaggtaaacgcctaattgcaaaatataatcttgataaagatgcagatcctcaacattacgggatcgggattaaagaactttgggaaatcgacccagcaaaacataaaccgggtctagtgatgcacggtgctggttggccattgtctgaaactggttcttctggtggttggtggttataccacgctgaaaacaaccaagtgactttgggtatgattgtggacttgtcttatgaaaatccacacatgtatccattcatggaaatgcagcgctggaaaactcacccactcatcaaacagtatttagaaggtggtaaacgtatttcttacggcgcacgtgctgtagtgaaaggcggtttcaactctttacctaaattgactttcccgggtggttgcttaattggtgatgatgcaggcttcttaaactttgcgaaaatcaaaggctcacacactgccatgaaatcaggcatgttatgtggtgaagctgtatttgaagcaattgctgccggagttgaaaaaggtggtgatcttgcggttgctcgtgtaaccgaaggcgaagatttattcgttaaagaattaacttcttacacagacaaatttaacaacagctggttaaaagaagagctttataacgctcgtaactttggccctgcaatgcataaatttggtcaatggattggtggtgcatttaactttattgaccaaaacgtctttaaagtgccattcactttacatgacttgaaacaagacttcgctgtattgaaaactgttgatgcaacgagcttcaagccaacttatccaaaaccagatggcaaactgacatttgaccgtttatcttctgtgtttatctcaaacactgtacacgaagaaaaccagccagctcacttgaagcttactgatccttcaattccagtgaacgtaaacttaccaaaatgggatgagcctgcgcagcgctattgccctgctggtgtttacgaaatcatggaaaatgatgacggctctaaacgcttccagattaacgcagcgaactgtgttcactgtaagacctgtgatattaaagacccatctcaaaatattacttgggtaacacctgagggtggtggtggtccgaattaccctaacatgtaattccttgcgccgctttagctgcggctcatatcctaagatgtaacaaaaagccccgattattcggggctttttattcatttacatatcgaacaaccttaccctttctgtaccagataacggtattctttatggttctgctcatctagaacttcttcttttaataggagttcgtgtcccaaatgcatacaaaacttagggatatcccaagaagtcgaagggtcagtcgccaacacttcaacaacatctcctgattttgctttgcgaatcgcctgatgcagcatcatgacaggttccggacaacgtaaaccacgcgtattaagttgtacagtaggtgaaataggttgttctgacataacaaactcgaacaaatagaattttcatattttagcataaacccatcactgtcttatgaactgtaactggcgtttacataacaatatgtgttttgtcttttactttgttttatagatgcataagggctttttcttcggtatgatcagtgtattcatttgatacattgagtctttaggaaagatcatgcaagaggaaccgagtccgtcgtggggtatgcgaggcttacgaaagtggttaggtacagcgccagaaacccgagatgaattattaaaactagtccaaaattcacgtcgttttttagaacctgatactgttgccatgcttgaaggtgttcttgaccttcctgctacaaaaattcgtgaagtcatgacgccacgaacagcaatgatcagtatgcaagaagatgatcagttacttgatattcttcacgtattggttgagtctgctcactcacgttttccagttttctcagctgaccagcctgataatgttgttggtattttactggcaaaagatttactaccatttttgactgaaccaaatactaaattagatattggctcgctcatgcgtcagccattatttgtgcctgaaagcgcacgttcagatcaagttcttcgtatgcttaagcatacccagacccatatcgcgattgtgattgatgaatatggatcaacagcgggactggtcacgcttgaagatattcttgaagagatcgttggtgaaattgaagacgaacatgatactgcggatgaagatgcacagtacattgttccagataacgaccatacaatagcgaatgcatggatggtgcaggcacttacaccaattgaacacttcaacactgttttagatgctgatttttctgacgatgaagtagaaactgtcggcggtttattgcttcaagaaattggtctagttagtgatttacaaggtcagactgttgagcttggaaattggttatttacgattgttgaagcagatgcccgcactattcatctgattcgagctgtacgtcaatgagagcatactttgaaaagctgttagattcttcgcaacaacaaaaacagcttcctttaatttttccattgctcattgctttattttcaggtgccgtgttcagttttgcactggcaccttattattggtggtggctggcaattttgtctcctgctctactctatgcgacattgcataaccgctcagccaaacaagcatttgcaattggctggagctatggctttggtttatggtttgtcggggctttctggctctatacgtcgatccatgtatatggcgataccaatgcttttctaagcgtatgtatgattgctgttatggcccttgtgatgggtttatttacagcatttcagacatggatttatcgacgcttcttccctgaaacaccgctgactttcgcccctctctggattatttttgagtgggctaaaacttgggtatttactggtttcccttggctgtttgtaggttacgcttttactgaacgtttactcgatggttatgctccgctatttggtatttatgcaatttcctttgtagtaattgtattggcatgtgctttagttgaaattctacgtaagcgtattttctggattatccctgctgccctattggttttgggtgcatggggagcatcatatattcagtttgtacaacctaaagcggctaaaccgcttagcgtttcgctcattcaaggtaacattccacaagatttaaaatggctaactgaatatcaagttagaacattagaaatttatgctggtttgactcaatctgaatggggccgtgacctcattgtatggcctgagtcttcaattccactcttccaaaccgacattgaaccgtttttggatgcaatggatgcacaagctaaaaagaaccataccgcttgggtaactggcataccttattgggatgtagcgaaatcgcatcaagtcggaagtccactgtattacaacagtattatggcctctggcagcgattcaagcggcctttataaaaagcagcgtctcgtaccttttggtgaatatattccgctgtcaggtttgctttcttgggtgttaccagccatgcaaaatgatattagcatgagcggttttacacgtggtgagagtgatcagaaaccacttttaattaaagggcacgcgcttgcggctgcaatttgttatgaagtggcttacccgaatctgacacgtcgtaatgcagaagatagcgactttttggtaactgtatctaacgatgcttggtttacgggtactgctgggccttggcaacatttacaaatggtgcagatgcgtgcgaaagaaaatggtcgctggtttattcgtgcaactaacacaggagtaacagcgtttattgatcaaaatggtcatatcactgaacaagcaccgattgataaagagtttgtcttgagaggcgatttaccagccatgcaaggtcaaactctctataaccgtctaggtgattatccaattttaggttttgcaatattactgctggttttaggttggatctatcgtccacgtaaagtagacgtgtcttacaaatcacgtcgctaaattataataactttgtacccagaggtacttcaaactctgggatacaaagtgctacatccccatctgcattatgaaaccctgttaccaaacattccgattggataggaccaatttgtttcttagggaaattcactaccgcaacaactaatttaccaatcaaatcctgcggttgataaagtttagtaatctgtgcactcgatttacgtacacccaattcttcaccaaaatctacatgcaaaatataggcaggttttcgcgccttttcaaaaacctcagcttgaataattttaccaacgcgcagttctacttttaaaaagtcattccactcgatttgttccatttcatatttctcatcttcttaaattgctgatttgaagcatataatatgtacaaatgaagaaacaccctgttttaagtccagttaaaaaataaaacgtagatgttgagtctacgttttatttaaaaattctgttttaaaataagattaaaaagcaatcgataattgcaaagataaataagcaactaaactggataaaaaaaccatcggcacataacgataagctttaaaaagcaattgttcgtatttagaagccatctgtttagtttgccatacactcgtttttaatgcggtaaagaagctcaccattaaccaagcgcttacaatacttaaggcaaagaaaccaatcatgatttggctacttccctcagtactcaaccatagctttaatgaaacttcagcaataggtaataatgctaaaatcaataggacagatttaagcatcgcccaatgaaactgattcagctcatcaagtacgagaaatgctttcatttaatctctcccattcattgaataaagtgctttttatttattatgcaaagcttttatttaaatatatagcttattttctcttatattttaactttcttgtaactattaaatatgggaataattcttattttaaatctcaaatctagatattaacttttttactttattttcaatgcattattatatttttatgattaagaaagattatcaattcggattattgttttatcttattaaccgaatcgataatctctcttacattttaattaaggctgataataaatatcggcatcgttaccttcaccaccttctttaccatctgcgccaaatgaatatagatcaaaaggatggccgtcttttccaggtacgacatattggatatcatttttccagctatctttaggataaccacctttcacataaccacccggcatccagttttttgctgtagcaggttgattaataagcgcatctaaaccaccttcttgcatggttgggaaatgcccattatcgagcttgtattgatctaaggcacccgctacccctttcaaagtaatttgagtcgtatcaattttagctttttcactacggcccatgacgttcggtacgattaaagcagccaacacacctaagattacaatcacgaccataacttcaataagggtaaagcctgaggcacgtttcattcgagcacggctcgaacgtgtcgcaagtccgaaagcacttgaagagcaaacatctgatacagagctatgctcggaatggcacgttggttcaaactgatttgaaaccacagattcactatgttgtttcatcgctgtttcgctttgaatattttttactttcatcattatctctaatatcaaagttattaaatcatattgttcatatttacgattggcagcataaccgcaattacaataaccagtacgatgcttgccattaaaactagcattagcggttcaagtaatgctaataaggttgagataaatgtcgtcacctcgcggtcttgcatggtcgacgcacgttcaagcatacggtcaagctcacctgatgcctcaccacttcgaatcatttgtaccatcattggtgggaaataaccactgcgctccagttgcgtaccgaggttaccgccttcggtaacacgctcagccgcttgggaaattgaatcacggataacccagttattggtcacagcagcaccaatctttaaggcatctaccaatggcacgcctgaacgagtcaaaatagataaagtactggcaaagcgcgcagcattaataccacgggatagtttaccgaataatggcaatttgagtgttaatcgatcaaaagcataatgtcccgcagtagtttttaaaaaacggacaaaagctaccacccctacaattgcaaaaagaataataaatacccatgcatgacggataaaatcactcgctttcattaaagcaactgtaatccatggtaaggcatctttgctttgatcgaaggtttttacgatctctgggaccacataagtcattaatcccatcacaataccgaaagacatcagcattaaaatgattgggtaaatcatggcaccttgaactttcttttgcatggcaaaacggttctcggtgtagtctgatagctgatctaaaatgagatctaagtgtcctgaacgctcacctgcagcaacagtagcaatataaaggtcaggaaaacgccctgactgttgcataccttgtgcgagtgaatgcccttccaatacttttgaacgaactgagagtaaaagattttgcacatgtgctttttcactttgtctgctcacggcgcggagagcttcttctaaaggaattgcagcagcaaccaaaactgaaagctgtctggtcatcagtgctaaatcgtaagcactaaactttttttggaataatccgtggctttgatgcttatctttttgttcaaccgggtcaacgctaatcggagtccatgctttatcgcgtaattgttggcgaatctgacgtgccgagtctccttcaagcacccccttttgctgcttccctgaagcatcaatagcagtaaattgatatgcaggcatggtaatgttctaattttccaaaaataatagtcgctgctgttgcatctatgctacgcaatcattcatattcattctatagcctgtgtagaatacccaagtcctcttcacgacgctatgccgttttttaaaattgacgaaatgagcctctatgaccataacgccaaagcctgattcagttgtttatcgtgtgcgtgttgccgtacctgtgcatctgtacgacacttttgactatacactcaccaaagcacaatatgaacgggctcaagtaggttcacgcgtcgcaatttcatttggacggcaaaacctgattggtatcattactgaaaaagttgacccacaagaatcatttacaggtcactttcagcttaaggccatttctgaacttttagatgatgagcctattttagatgaacaagttttaaatttattgacatggtcagcacaatattaccaattcccgattggtgaggtgatgcagactgctttacctgcgttattgcgtcagggcaaacccatggatgttttatttcatctatggaaaatcattccatgtgataatgccgaagctttactaaaacgttcaatcaaacagcaagacgcttatcaaattttaaaattacatcctgccggaaccactgaaaatattctcaatttaagtggtgtagaaactgcaacacttaaagcactgcaaaagaaaggtctcgtagactgtacgcttgagcctcatgactttagtccatcccctgtgcaattggcgcaaatgccactcacgctcaatgaagaccaaaagaaggccactcagcacgtccttaatgcacagcatcaatatcaagcctttttattagatggtttaacaggaagtggtaaaactgaagtttacctgcacatcatgcacgaagtgctaaagcaaggtaagcaagtactggtgttagttcccgaaattggtttaacccctcaaaccatttcgcgctttaagtctcgttttaactgcgacattgctttattacattcggggttaaatgactctaaacgcctacaagcatggcaacaggcacagactggaaaggcctctattattttaggaacacgttcagccatttataccccgctgccacgtttgggccttatcattttagatgaagaacacgacctgtcttataaacaacaagaaggtttccgttaccatgcgcgtgatgtcgcgctttatcgaggacatttacaaggctgtcctgttcttttaggttcagcaaccccaagcattgacagttatcacttagtcgaaactggcaagttaactgcacttcagctgaaccagcgtgcaggccatgcgcttttaccaaaaatgcatttgattgatcttaaaattgtcaaaaaacagcatggtattagtcagcctttaatcgaacagattaaaaataccctagcaagaaaagaacaggttttaattttcttaaaccgacgtggttatgcacctgttctggtctgtgaaagttgtggttggcaagcgaattgtcctcattgtgatgcacattttacgttgcacactcagccttattcttacttacattgccaccactgtggcacagttcatcgcttgccagaccactgccctgagtgtcagcaaaaaagcctcaaaactttaggtgctggcacagccaaggttgaagagcatttacaagaattattcccagatcatgatgtgattcgggtcgatcgtgacagcaccagccgagtcggtagctggcaaaaaatttatgatcgcattcagcaaaataaaccttcgattttgctcggtacgcaaatgttggcaaaaggtcaccattttccgcatgtgaccttggttgctattttagacattgatgcaggtttattgagtgtcgatattcgagcgccagagcgtactgctcaattgattgtacaagtggctggtcgcgcaggtcgtggagaacataaaggtcatgtttatttacagactttaaggccagatcaccctttattgaccacgcttattgaaaaagattatcgggcagtcgcgaaacaaacattggctgagcgtaaagttgcattactgccgccttatcgctatgccgtacttatacgcgctgaatcgaaagatcgcgactataccttgcattttttaaatgaagctgccgagcaacttcgccaaatagcaggtgatattgttgatatctgggggccaattccagcaccaatggaacgtaaagcgggacgttaccgcgcacatatggtgattttgtctgctgaccgcgctcgtctgcatttttacttaagacaatggtgggctcaattggttcatgcgccaagacagcatcaactcagactctcaattgatgttgacccgcaagaatttagttagatgatttgaatatcatggtgtgaagaacactttttccctttacacttaaaaaagatcaatacattcggggcaatgaatgtcattcctactgcaagcaactatttttcttggagcatctctgattttagtccctttgggcaaacgcctagggattgcaacagttttaggttatttatttacgggcatacttcttggcccgagtgtgttaaatattgcccatgaccctgaggccattatggagttggctgaatttggggtcattttacttatgttcctgattggtctagagctccgcccacaacgtttgtgggaaatgcgtgactctatatttgtgatgggaagtttacaggtcgtgattacgggcataattcttatgctcaccgtattgctgctatttcaacaacaccttgctgccagctttgtgattggttttgcgcttgcgctgtcttctacggcctttgtattacagcttctgactgagaaacaacagctcaataccacctacggtcagcaatcgttttcaattttgctttttcaagacattgcagcaattccattacttgcggtaattcctcttctggcaggaaccgaatctacccatcatggtattgcttattttgcagccatcatcgcgacgtttaccggcttgttcctatttagccgttatgtcatgcgcccatttttccgttttgtcgccaagagtggtgcgactgaactgattacggctgtagggttatttattattcttgccgttgtgttactgatggacactttaggcattagtacaacattaggtgcttttcttaccggagtccttttagcggactcagaattccgtcatgagcttgaagcgagtattgccccgtttaaagggctattacttggcttattctttatgaccgtaggtatgacgacacaattgtcgttactgattgaaatgccttggctcattattggtggagcaatcggcctactcgtcatcaaaaccctcgttttaactgccattgcccgctataaaaagtacagttggaacaatagcttgttactcgggacttgcttggctcaaggcggtgaattcgcttttgtaattttgagcctagcaaaaagtgaaaagattttaacggatgccttattagagcctgtcacgttgattgtgaccttatcaatggtccttaccccagtaatttactggattatggcctgtaagatcattcccctttttcataaagaattgccacctgaatatgatgagattcctcaacaagataatccaattatcattgctggttttgggcgctttggacaaattattgcgcgtattgcccgcttacagcacttaggatttaccgccatcgataacaatcttcatcaagtggactttgttcgacgttacggcggtaagctctattatggtgatgtcactcagcctgacttactccgctcagcaggcattgaaaaagcgaaagtatttattttagcaattgatgatgtcgaagactctatgaatgtcgcacgtcatctcagattgaactatccaaacctaaaattactggctcgtgcccgtgaccgccaccatgtgcacctattaagagacttaggtgttgaacatatttggcgtgaaacctatttatcatcattaggtatggcttatcgtgctttacgcgaactcggtatttccgatgaacaagcttataacaatatcgaaatctttcgggattatgatgagaaattactcatacagcagcaaagcatttataccgatgaacaaaaggtttttgaaactcatcgtaatgctctggcagaacttgaacatctatttgaaagcgatgctcaacaagccacatcgaagcacgacgttaacttaaagcgtcatttacaaccaaatcgtatcgacattacacgagatcacgaagaataacttgagatttcgcaaaatggctatattaaggacttattcacattgcctaaatgattgcgacaatcggtacaagagttgccgttgtcctgcttgcagcttcgctgcattccctaagcctgattaaaccgaaattgttataatctgcttagggccctggagaatattatgtctgatttacgccaacgcttttatatagaggactttcctgttcgcggtgaagtggttcatctagaagaagcattaaaaactattttagctcaacgcgactacatgcttgcggttcaaattctattaggcgagatgttgagcgctacagcattacttgcgagtactttaaaaatcaaaggtcgtatcagcttgcaaatccaggctaacggctctttcaaatgggctatggcagaatgtaaccatttaggtgaagttcgtgctttagcagactacgaaacagatccacgttttggtgaagcaacagatagcagcactgttttagcggctttggttaaccctgttttatttattaacatcgaacctgagcatggtgagcgttatcaagggattgtacctcttgatcaagcaaatttagcaggctgtttaatgcagtactatgacttgtctgcacaaattccaacccgaattgtactggcaagcaccgcacagcgttcaggtggtttgctcattcagttattacctcgtcatgatgaggaagagcaaaaactggttgatgaagatttatggccacgtttaaccatgctaactgaaacgcttaagtcagaagaactgacagagctttcagcaaatgagattttgtatcgtctttataacgaagaagaagtacgtttaccagaagttgaacacttaaaatttggttgtacttgttctaaagaacgctgtgccaaagccctcattcaaattggtgttgatgctgttcatgaaacattggaagcacaaaacccgattcaaatggattgccagttctgtaacacccgttatgagttcactgctgaagaggcattgggtctgtttggtgaacatttgagttaatcacctacttcataaaaaggcgggtaatccgcctttttatttatctataatttttttgatgataattttcagcatgttattttaaatcagttaatatgagcttacttgataacccaataaataagatgcttatatctcatgaattattttgattattttctctttatttttagtgtcattattatgattgcgacccctggccctgtcatgattttagtggcaagtgccggacttaaaggtggttataaaaaagcactagaaaccatttttggtacaaaccttgcctctctcgttttaatttttatttcagtactcgtacttaaaggcgtattgggtattaatgaaaattatttaaatattatccgtgttttaggctgcctatatattggttatttgggttttagtattctcaaagaagtcattcaagctcctcatcctgaagcaattcaaaccgtttctgctcaaaatggcggttttaaaaaaggctttttagtgggtatttcaaaccctaaagatattattttcttttcagctttctttccgcaatttgtttctatttcacctcatctagatttaagtttaactattcttacgctgacatggatagttttagactttttaacgctatctttagtctatatatttttccgccgcctctcgaacagccatttatacccgaagatcctcggtttatgcggtctattactgttagttattgccgtttacggtttatatcagacattcatttaaacaatgagaggcatagctctcaccgttctatgtctcttttattttgctcgccctatttcgcacgagaacaactcttatacaatctagctcattgaaagctttaaaaatcgtttcataatgaaataaacaacaccatcgtgataaaacattatggccaaaaattattatgaagaattaggggttaaacgagaagcctcagctgatgaaattaaaaaagcgtatcggaaattagctcgtaaatatcatcccgacatcagcaaagaaaaagatgcagaagaaaagatgcaggcaattaatgttgcctacgacaccctaagtaacccagagaaaaaagctgaatacgaccaaatgttagaccacccacaaggttttaatggttttggtcaaggggcagctcaaagtggtttcgatggtgccaggttttatcgtcaaggttttacgggcggtgagcaagcagactttagtggctttgaagacttatttggacgctttggtgcaggctttggcggtggacaacagcaatatcaaagacaacaacgtagttatcgaggtgaagaccagcatgccagcatagaggtcgatcttgatattgcttaccatggatcaacacaacacattaccctacaaattccaaccattaatgcctatggtgagccagaggtacaacgaaaaaccttacaggtaaaaatacctaaaggcatgaaagaaggtcagcaaattcgcctaagtggacaaggacaaagtggtattaatggtggtgccaatggcgatctttatatcgagattcagtataaagatacagatcgtgtgcatgtcgaaggcagtgatgtatatttgactgtagatgtagcgccatgggaagccgcattagggcaaggcattgaagtaaaaacgcctgcgggacctttacacgtcaatttacctaaaaatgcaaaacaaggacaacagctacgtttaaaagacaaagggataccaaataaaacgccaggccatctttatttaattttaaatattgtattcccaccggcgcattctgaaaaagaaaaagaagcctatcagcaattggcagaagcctttgcttcattcgaacctcgttcatctcattagggagcaagatcatgacaaccatccattatcgagaaattgtatgtgacggccacacctttagtgctgaagtcgttgatgaacaatgtacatttgacttgcaacagtttgctcaagcctgtggtcaaagcccagactggattctccagctcattgagtacgatattttagcgattgatacaccacctgaaaaacatcaattcatgggtgaagatgttattcgcgctcgtaaagcgtatcgtttgcaacgtgactttgatgcaagccttgcagctgttgcggtgatgttagatttgattgatgaagtgcaacaacttagaaaacagttgaagcattttcattgaggaatagcattaatacagcataaaaccctagttgaaatctgatagcctggaaagccatctgcaacctgcgtggtatcaatcagataatggttttgtaatactgttatttaaaaataggtattgaacaggttttgcagatggtaatggttttgcctacttttgccgaaacaaaagtaggtcgaaccgaaggttcatgactatattaaataacaagtcagcaagacccagtcgtgcagaaataaaaatttatttcaaccgagtaatcttttccacttccttcaaagtctgcttaatcggttcatattccaaaaaccaaaacaaattcatacgatcttggcgatgctgctgcgctagtaaatcaatcacacttttttcaccacgccccaccaaatgctgtctataaaaatagtagagcaataaaatggtactgagcagcataaccccaagcataatccaaaaacctactggtgatttaagcccgggaataaactcaaagttcattccataaatacccgttaaaagcgtaagaggcgcaaacacagcagtaataatggcaagaatacgcatgttctcattggtctggttagcaattgccgagaaatgcaaatctattgccgattgaatcgcactacgtaaacgcaaggtatgtttttgaatacgttcgacatgactcattaaatcgtttaaacgcactaataaaaggtcttgagaactatgcgtcttctctccaataacatgatgatagttttctacaatttcatcacgaaactcttgtaaggtttcgatttgttcttcgcatagattttcaacctgttgaaaggccatattttcatgaaacagttgatgccactgcttaaaacgccgattcccttgtaatagctgttgttgccaatgctcgacccttctggtcaaaggtgaacgaatatcaaggtaaccatccaccatactattgagcagacgtaaacacagatctacaggtgaattaggcagcttacgggttttattttgctcttcgagagttttacataaaatattttcaaggcgctgaatataattttcaatcgacttgttgccctgttcacgtacgctaataagtactttaggcgtaaaaataaaactgatcggtgtggtggctaaaccaaatacactctcatgtgattcgccatttttaatttcatcatccggcgttacgagctttctaaaaataagcaggtcgtattcttcaagcgtatcaaatgcacaaggatgttcgatattcgcaatatctcgcatatgaaactcattaatggatacatctgcaagttgctgaattttttgttgccattcttcattctggctcacaacatccgatctcacactatcaatccagaaaaactccagaatatgttcagtgtgcttttcacggcttataaaaacatagccgtcgctttgatgacgataaaaataataaacctgcataccatgtcgatctattggtgtattacttgcatcatgccataaaaaaagcccgcatcaagcggacttttttagtgagttaagcaattatgcttgctcaatatctttcatagtcaatttgatacgaccacggttatcaacgtcttgaacctgtacttttacttcctgaccttctttaagaacatcagttacgttcgcaatacgctcattagagatttgcgaaatatgaagaagaccatcagtacccggcatgatgtttacaaacgcaccgaattctacaatacgaattactttaccgtcgtagatcttacctggttcaacttcagcagtaatcgcttgaattttcgcaattgcagctttagcagcagctttagtttcaccaaatacgcgaactgtaccgttatcttcaatatcaatagcagctttagtttcttcagtgatttgacggattgttgcaccacctttaccaataacatcacggattttatccggattaattgtaatcacttcgaatgttggagcgtgcattgaaatttcaggacgagcacgtgaaattactttgttcatttcattaaggatatgcatacgaccagcaaatgcttggtttaatgcaacttccataatttcttcagtaataccttcaatcttgatgtccatttgaagtgcagtaataccgtttgcagaacctgctactttaaagtccatgtcaccaaggtggtcttcgtcacctaaaatgtcagaaagtactgcgaaacgctcgccttccttcactaagcccattgcgataccagctactggtgctttaagcggaacacctgcatccataagtgataatgacgcaccacatacagaagccattgaagatgaaccgttagattcagtaatgtcagatacaatacgaataacgtacgggaagcggtcagctgcaggaagaactgcttgaacaccacgacgtgctaaacgaccatgaccaatttcacgacgcttagggccagattcacggcctgtttcacctactgagtaagcagggaagttgtagtgcaacatgaagttgtcagttttagtaccagcaagggtatcaaccattaaagcatcacgagtattacctaaagtcgttgttaccaacgcctgagtttcaccacgtgtaaataatgcagaaccatgtgcacgctcaagtacgcccacctgtacatctaaagcacgaacagttttggtgtcacggccatcaatacgtggtttaccagataaaatgttgtcacgtacagtacggtatttaagatcttcaaataagtagtctacttcgtcagcaataccgtctacatcttcttcaggaacgaattgagcaacagcttcagcatgaagtgcatctaatgctgcataacgatcttgttttactgcaatggtataagcttctgaaatttttgcttcaaatgcttcttttaattttgcacgtaattcttcgttgtgtgctggagcaacccagtcagatggtttcgcaccagcagcagctgcaaattcattgatcgcttgaattgcaatttgcatttcgtcgtgaccaaaaagaaccgcacctaacatttggtcttctgaaagttctttcgcttcagattcaaccatcaatacagcagactctgtaccagcaaccacaaggtcaaggtcagactgagccatttgctcaaaattcgggtttaaaacatattcgccgttgattaaaccaacacgtgctgcaccgattggaccacggaatggagtacctgcaattgctaacgcagcagaagtacctaacattgctgcaatatcagcttccatcgttttgtcagaagaaaccacagttgcagttacctgaatttcgttgtagtaaccttctgggaacaatggacgaattggacggtcaataagacgtgaaattaaagtttcagcttctgaagcacgaccttcacgcttaccatatccaccagggatacgacctgctgcatattgtttttcttgatagttaactgttaaagggaagaaatcctgaccagcttttgctgttggagcagcaactactgctaccaatacagttacaccacccattgtgattaaaactgtatttgcttgacgtgcaacgcgacccgtttctaaaacgacttgatgctgaccaaattggaattctttacgaacgatgttaaacattgacatgtattgtattttcctaattttattctagtgagacccctaaggtttggcattcaggctacaactatcggtaggtaaatgacaaagcttagaagccatcacactagaccaaaaattttaaataatattaaacgcaaagaaggagcgcacaagcgccccttctataaatcgcctaatggtttattagacgaaactttcttttcagaaacaaagcatagcaacatgcgataaaccgaaaacaaagcaaaatcgaattaacgacgtagacctaaagcaccgatcaaagcagtgtaacgctcgtggtctttaccatttaagtagtcaagcaatttacgacgttggttaaccatacggatcaaaccgcgacggctgtggtggtcgtgtttgtgagctttgaagtgaccttgtaaatcattgatttgagcagtcaataaagctacttgtacttctggtgaaccagtgtcgttttcagcgcgagcaaatttagcaatgatctctgcgcggtctgcattagttaaagccattcgatttctccgagatgcttaaaaaataaaatgatatgaatcagttgagcgcaactgactgccgtgcatcactacagcaagttgcctattttaaggtatctatatatggattgcaaaattgttttctgttacctgtcattttagacactgacatcagcttcttaaccctgcacacttggccttgaataaaaagaaagaaacgcgagggacgtgtgaaaatattttcgaccaatacctgtccggtaccgaatgaccttgaatcggtcattcatcacaaagatgaagtacctgccgaactaggtggaatgagtgaacagcaagttcaaaaaatctggaaaagtattgagtcactctacaaaaccggaaactatccgcttattactttttgcttacgtcgacaggggaaaattttattaaatcgaagcattggctatgctcaaggaaactcgccggctggtctgcaagagaatgcactcatcgcaacgccggatactcccgtttgtctattttcagcatccaaaatgattactgccatgttaattcatcttttagatgaaaaaggcgaaatcaacttacttgaccccgtgagctattatattcccgagtatggggtgaacggaaagcgccgcgcgacaatctttcatttgttatctcatcgtggaggtattccttatgttgatggagatgtcacacctgaactgctttttgataaagatgaaattttaaggcgtttatacgcagcaagacctgtttctccagcgggaaatcacctcgcctatcatgcagtaacggcaggttatatcttaggagaaattattgaacgggttacagggcaagaccttcgccaatttgtgcatgagactatcgagaaaccgatggatatgccctattttaactatggcttaaaaccagaatatcgtgctgaagttgctcttaattgtgcaacaggtttacatcctcgcttaggaacagatcattatctcaatcatgtactaggtggaggcttacaactcgctgtagatgtcactaatgatagccgttttatggataccatctgccccgccggtaatatttataccagtgcagagcaagctggacgcttctttgaaatgcttttaagtgggggaagctaccaaggcaaacaaattttaagcgagaaaacaatttttagagcaacgctccctaccacaggagttaacattgaccgaactttattaataccgatgcgctatgccttaggaccaatgctaggcagtaatccggtaggcttatttggtccaatgactggacaagcttttggtcacctcggtttttccaatattttgtgttgggccgacccagagcgtgatatcagcgtttctttgttaaccactggcaaatctgtggtcggtacccaccttcctgctctagccaatctgctttatcaaatttcgactcaatgtccacgaattcctagagatcaacgccgttcactatttggtagtgattcgcatgaaaccgatctggtatagctaaaattaactcagcggcaaaataaaaaacccaagcatttctgcttgggtttttggcgctgtagttgttgtttatcgtgtttatcgctgttcttattgttatgtgtgagatgctttccacatccttcttctcgttttactcacttccgttgttttagttctatttccttatgggatgtattttgtcatatccaattatgaagaaaagtagtatttttcttatcatcatgtaagcgaaaacgtacaggtctgtctaatatttatcgtttatctgtaaatgctaaataacatacggttctgtataacatttaacttaacaattcacgcaaaaaatgcttatttaagaatcatattacaaataaatatattaaaaattattgagttaaataattgataatataagcaagaaatagggtaagccatctaaagatttatgcagatattttggtggggttaagacttaaatataaaaaagccctgtagtctctcccaaaactacaaggcttagcggctgtaagtttcctctttattcacctacatcattgtaagttcgcagtctctcgacttaagttattattattgtgcgattttgcccgacattccttgccaagctcgttgtgcgtttataatctcaaaaacagggtgggttctctagcagcaaatatctcgaatccatgtaagctttttcttacaagggtaaaaatattaagtttggcttaacgaactaaccgattaactttttcaactaaaccgctttttcttgtcgtgcgaactgtaaaagattgaagtaacgcctctggatcgaccaataaactcactacttttttggctcgtgtaatcgcagtgtagatcaactcttggcttaacaaattcttggcagcctgatcaagaacaacagctgtatgggtaaattcagaaccttgtgatttgtgaattgttaaggcaaatgcactttgaatacttttaggtagccgatttgcagcaacccacttatttaaacttggaaaatacacttcaaactgttgcggctgggttctatgttcaaaacataaaccaatgtcaccatttgaaataccgagctggtaatcgttataggtcatcataaccggacggccaacataccatcctcctaaagtcacaatacctagctgttgttgtaaccagcgttcagcatattgattaagttgctgtaaaccaaatggtccatgacgtacggcagttaaaatacggtagtcatcgaatgacctaacgatattttcaatatgttcaagtgaacgatcatcttgtatataagcttttaagctttgcacatagccttgaaaatccaccatcaatttttggtagtaagtttctagcgctataggtgactcttcgggtaaatattcaagctgaaccacatcgggcatgtcggtttctaaaggtattgaacgtaactctgaaacctgaacaatatcgatttcaaatttttgtaaaatttgctcatggttgatttgactggtttgcatttgaataaatcgggcaacctgaccaatcaaagccccttccgcaaaacgacggctggtttgaaggtgaacacggttttcagacaaagcctcgatttgctgtaaatctgcaagtacagctccgacgtctacggaagcaagctggttggcatcacctaataaaataattcgacaagactcaggaaccgcttcaaataataacgttgccagatttaagtccagcatagaggcttcatccaccacaataacgtcataaggcaaaggctgtttttgattaaaccgtggagtttgactatgccccatacctaataatcgatggatagtttgggtactttggtttcttagctcagcacttattaaccccgactcaagcagttttgggtcattaaaggagttttgtaaggcttcttgcatacgctgtgcagctttacccgtcggagcagccatcgctacacgaatatgtggaattgcctgactaagcacagcaataatacgagcgagcgtataggtcttacctgtacccggcccacctgtaataatacttaagctctgccgagtcaccatttgcaaagcagcttgctgatgaggatctgttaataagtctaaatgctcttcacatgaaacaggttgaattggttgttgctttaatcggcgaatttgctcagctagacgttgctctaggttccaatatcggtataatgccaacccctgctcgtcgtggacacaaggggcaacttgagactttgcttgttcagcagatatcaccagttggccaagtgtttctatttgctctgggctaatctcaatacaactgtcaccctgcaagctcgcttcaatcagctgctgcaaaaaataagctgcctctggagcttgtgtctgtgcagtaaacggggcttgatttagaaaggtactccaagtcgttaaccagcttaaatcgctttgttcagggctatttagattgtccacacacttatccacctagttttccacacgcttgtccacatggttatagacaggcttatccacaccccaagtatttgttaattttaaaattagatcatttatcagcattttttatgcaattttatcctcagcaaagtaccctaaaatagcatcgagtcgtagaacaaattctgtacttggctgccaataataataaccctgctcagcttcgccattcataccgcgcaagtaaagataagtcgccccacctaagtgttgttcaatatcataattctgcattttgacttttaaataacgatgtaacgcaaccaaatacaggcctgcttgtagccaatagctggctaaagacatactttgtgcaatgctttctacactgtaatcagcaaggttttcacccaagtagttactcttatagtcagcaatgtgataacgctgtccatcaaaataaaccaagtctatcgaaccatttaaatagcgtgcagaacgagcctctaataactcgggcatttccataccatattcagcaaacagctgctgaatacgtttcatggctaacacacgatccgacagtgccaaataaaaaggacactctgataaatagtgctctggctgtaaccgatttaggcgaaaaccttgatataacggcgtgcttaaaatctcttgcaaccattcggctacagcgtgataaagcgaatattccgcttcttgttcttcgggaaagctttcttggtatttgattaataaatcttgccacaaactactgtagtcatttttaaaacgacgacgtatttcgcttacccactcatctgaacattgaaaatcaatatgctcaaaaatttcatgtaagaaattacctgcgagcgtccctctcggaaaattgcttttgatccagctaatgggctgtgctgcgggcgcctcaacagaaataacctgatcgagttcatcttcggctaaaacagcttcatggctctgactcgcgagtaaatctgtacctactttatgtcttaaatgctgtgccagataactaaaactggttttgcctctcgaataaaagcgctgatcaggaaaatgctgcgcctgtatctcaataatattgatgtgttgatttaaatgtcttgcagcaggtggttgctccaaaattatttcatcggtacaacaacggtgctggaatggttccgctctgtttttccaaaatgccaaacctgaaacagacttgccatccgtatcttgtaagagcgcgtaaacacgatgacttgcccgggttaaagcaacgtaccatagacggttttgttccgccaaagcccgttcttcatgctgcttcaactcattttcgtttaaatatgttttatcggcaatcgcaacaacacgttgtgttagagtttgagccgactccgaaaccgttatatcttgggtcgagaagttaagtgttttgttattttcccgaaatggcttgtcggccccgagcaaaaagacaattttaaactcaagaccttttgactggtgaatggtcatgagctgtacgccagcttcactcgacaatctacgctctaactcccattcacgatcaagcggtgattgtaattgcttgagataccagtgatagagattttgcgcgccctgatatttctcgctatgttggctcaaaatttcggtcaaatgacgcaagttcaccacaacccgctcattatctttactctggacagcaaccagatttttccaaatgccaaattggtttaaacattgctgccatgctactaaaaagccctgagctgaccacaattcccgaatagtatcaaaacccgtcataaactggcttaaaccttcggccgtttgttcgagttgcaacagctgtttaaggtccatagcaaataaacggctaatcaaagctcgtttcactttggcctcatcgtaaggatgaagaatcgcagtgagtaaggccccaacatcctgagctattgtgcaatcaaaaacacttcgttttgatggccgattaactcgtattcctaaacgttctaattcaaattgaactttatcaagaccatcatgattacgcgacaagaccgcaatatcatcttcatttaaggtttgagtctgagcatctttttgaaaataaagttgtccagcatgtgactgattgagtaaatcacgtattttccacgcgacttgctgtgcttccgtttccttgtcttttagcatgagccaacgtaaaggatgcggattaggctggttttgatcaattaaaaccggatgaggtcgagtccctgcccgaatcgggtcatattgaacctgttcaccaaagtcgatttgcctttggaataacgcatcaaccacttcaaccaagtcagcgactgaacggtggttatgaattaacttatattcgcgaccatgctttgcctgaatatctttgtaggcattcaagaaggtgagcatatccccaccacggaaaccgtaaattgcctgcttacggtcacccaccataatcatgcaacctttttggtaacgttctggatgacgccaaatgctggcgagcatgtcatcttggtcttggttggtgtcttgaaactcatcaaccaaaattaaggggtatcgagcctgcacaaatacggcgaaacgttgcccctgctcgccctttaaagcttctgacaaagtgcgaatttgctgagaaaaggtcgtctcgcccttgttttgtaaaacctgtggtaaacgttttttaacctctatacacaaataggcttttaaataaatatgaagctgatcgaactgttcagcatagtttttcagcacaccaaacaactgctgaatctgctgaatacaaggatgctgataaaatccatctgaaatttcggcaggacatttcttgaaaactttctgatcggcaagctggcctaaaaacttaaaaacgagttcccgttgtattgccaaagacccatcaaaaactaaaatactgtcgctttgctttaaaacttgtaataactgtggcaaacattcactaaataacttattaaatgctccattacgaaatattgtgccgcttacatgtttatagtggtcgccatcaagcgagtaatacggttctagaagactgatatcaatttctgctgccagctgtttgagctgagcaagctgttcaaactgaatggtaggcttttcgggaagtttaaagtgagccgaactaaaattcagtgagtcttcgaccagtttgacaaaactgtcgacactttttaactcacctgccagatacaatgcatcaatcacggtttgaggctgagactgtatccattcacgtaaaacatcatgaatcagttgtcggctataggttttggcatcatcggtaatttgggcacgttcaatttttccgctctcaaaagcaaactcacgtaatagcttttggctaaagctatcgagtgttccgacaaatagctcatctagctgatcgatcacgagctttaaacgctcacaggcataggcaatacgtgtcgcaaaatgcttgagaatatgttgcagtaataagtcagattcttgctcggcctgcaaaaggatctctttttcagtcaagctccgcttggcatctaaataacggtgggtttcgaccaaacgcgcacgaatccggctttttaactcagccgcagcagcacgggtgaatgttgttgcaatgacttggcccggtaaatatttctcaagaaaaatacgaaccattaaactcgacagtgtataggttttcccggtacccgccgaagcctcaattaaatgcagtccactaaattcaatatcaataataggttgataagacacctgtactcttgagttcatgccttactccgaatgttgaaattgaaaaaccggatgatacaggtcataggcaaactcatcacaagcatgttgaagtaatgcttgtgcatcttgttcttgcaaaatgaaacgccagtcttgatgtaacttgcacgcttcattttgtgtcatatcgatagaggtaaatgtccccgtttcattccagtattttaacagctctgcatagctcttctcatccagttttattttttctgtcggatttgttgtttcccactgatatgccttagctttttcaagtggctttaataataaagctgctggtaacacgagtggctgctgttgagcataacgccagattttaaaccacggttgtaaatactgccgagcttgctccgaactaatacctttacagatgacagtttggtcactaaaaaccacaatacggcgtctttcagttcctgcacttccttcatttaaataggccaaccaaagcaggtactctaaccagacttttgcacgtctttttgcccgagcacttgatgcttccatactgacccaatcctgagtttcagattttggcacagtaatattcatatgtagctgtttggcaattcgccacacacgctgagtcgtttgtgtcacggctggcgcgtaatgatgaaggcgctcaagcaaacattcctgttcaaaaatgccctgttgccatgcactgtattgaactttgcctacaggcaactgatcaagtagaacttcaggctgtgcctgctgttcgttttgctgtaaaaaatgtcgaatggtataacggcccaaaccatctaaaagcaaaggttcattctgatctaatacgcttacatttcctaagttttctacgcctaaagtttttaaatataaacgtgcggggaaagtcacatcctgtatccactgatggctgtctaaaaccaacatgtcaggtatttctaaaggataagatatatttgcccaaggcttaagaacaccggaagcttgctgaatttgcatcgccacgttaaaccagtgatcttgataacgaatatagcggttctcagccataaaacctttcgggtcaaacggctgtaaataatgtaagtgatagagctgttttaattgagtcgggatttcaataccttcaatcacttctcgatcgggtgcatttggttctggctttacaataagtgcaagatgctcacggaactcttgaagaatactagaaggatctctcacctcaccgtcattgacatcaaagccgttataaaacagccataagttttcttgagctaaaagtagggcatctaagaaagcgccttggtcatcctcaagacgggaacgatcacctaattgttgacgtaaggcatccatcaaatcaaatggcacatgggtgtctcgatttggaaactgccctgcatcaaggttcaacatcacaattaaacgataaggcaacggacgaatttgtccaatctgggcaaaggtaatctgtccagtcggttcagcttgagccgtttgattttctaaagttcgctgaatctcatccagaatataaggcaaaggcaaggtgattttacgtaaggtgcctgtttctgtctcggcatagtagcttgcgagcgttaacatacgctcttgtttttttacaatttcccgcgcagtttttaaagcagtcacaccggcctgctcaaactcgataatatcttgcgagagtgtttgcaaccagtattccaccgtatgacttttcttctgctcatgcataatgagccagtcacggcgttcatttaaatcttgataaatctgaatgagcgtaccaataagctcaaaatcgcccggttgaaccttagcgtaactcagcacctgattaaatgtagcatgttcgggaatggctatgccgagcgctaaccgctctaaagcaaatttaaagctatatcggtagtcatcatcgccgtcacataaactacgtttcagatgttctgcatcaagcccacgtttaaaccctgcatcagcaagtaaatttaaaattcgctctacttgagcatattcaagtgcataacgctgttgagtcgcgtgtaaaccaagccagtcagcaaactcatcaaagctaaatcgcccttgcataaggtgaatacgcccaatcacggcacgccatgcattaagtgcatcgagtgaggcaattcctgctattttgacaggcaaatgcacgccttgctcagtcgctgtagcaggaaaaacacttcgtattaaaggctctacttctgccaaattaggaactaaaaccaaaatatcatttggacgacgcggctgttcgtgcggttttgccaaccaaccaatcaattgttctttcaatacttcaagttgccgtaatgtcgagtggcagacatgaatctgaattgagtcatcgttaggggcaagctcatactgctttgcttggggttccaccaagtgcaaaatatctgactgaactttgccaagtaaactttcaggaaaatcatcgacaaaagcatccacccacttaccttcttcacctgtagacaagtttgagagtaatgagaagtggtcgcgggcttgtttgcccaatcttgttaacagcggatgtcttgactcacgcgcctcagcattaaaattaagcgtaaatttattaaagaaatcggcaatttccgcatcggtcgcttgggggttcttcgctataaaacgctcttttacccctaagtcatagcgctgtttccagagtgggtcgacactatcggcccaatattcttgcgaagggttatagtgcaaaatcaaaacatcgatgtattgccctaaacgacgtaaaaactgaagctggctgggtggtaaatccagtaaagtaaaaatgacaatttgctgcggcaaacgagacagtgctttcttctggcgctcaggatgttctaattcctgccagaataattcgtcaatttgctgcatttgcataaaatcttcatgaaaatgttgctgccataaccagcgctgccaacgttctaactcttgggtttgctgcaaagtaaatgccgaaacttctttatctttatgggcaatatacttttcgatatcgagtgatcgcccttgtccccatgctgctaaccagttatttggacaagtacacatattttcacaaccacgctggcactgtccccgatagaccatgtagttactaaataaatcggcaacctgctcagcaacccaatacaacattttttgcttttttagctgcttctcaataccttgttcaagccgatctgcgctgtcataaatacgttgaacaatagaatgcagtggatgagagctatctatgctcataacatcaggctgaataaattcctgtaaggcttgatgtacacgccatttaaaaatcaagcgtggaatattggctttacgaacctgttccttatgcgccgtgaggacctgttgataggcataccactgaaacccgcgcacacgttggtgaaactggtaattggcactcattccttgctgttctgcaagtttttgtatcagccattgctcgatagcaggacttggcacaatgaaatgctgggctttcaaaacctgtaatggatgcgttgacggctgggacgtagatgccagtacgccctgcaacaacacatcaatacgttgactttgaataacatggatacccatttatttcatatcctactcgcataatttatgcacaaaatcataaacattcattactatacaactgaatctgactatgtcacgttggtttaaacacagcataatctcattttaggtgtcacttaccttgtgttggcaaggcacctttaaggaacacattacaggtaaaacattatgaaaattgataacattcctgactatattgatcctagcctaaatctggaacaaattcgcgatgagtgccaagaactcattcagaaaagagcttacgtctctgctggtgcagcaattgtacccattcctttttttgacgtggtagtagatttgggaattttgtcacagcttattcccgatattaattcccgttttggtttagcgcctgaacatgtcagtgtctatgatccaaaaacaaaaacaattcactgggatgaattacgaaaacgcggctttcaattttcaggctttgtggttgctcgcactaccgttaaaaaaacctttaacggtttctttggaaaaattgttaccaaacaagtgacaaaatttgtaccactaggtgggcaacttgtcgcagcaagtttaggctattttatgatgaaaaaaatagcccaaactcatctaaatgacagctacaaccttgctaaacgtattcaacaaaaaagtcgtggcacggttgtaaactaaaatctaacttacggctgagagtttaatctgctctcagctgttttaaaatagctcttaacacttctaagcgtgcagtgtatttatcgtctgttgcgacaatataccaaggcgcatattcggtactagttcgctcaagcatatctgcggccgcctttaaataatcatcccacttatcacggttacgccaatcttcggcagtaattttaaagcgtttgtgcggtgtctcttctctggctttaaaacgttgctcttgctcatctttactaattgccagccaaatttttaccacaatcgtttggctatcaaataagtctttttcaaagcgattgatttcgtcatatgccctttgccactcgataggcgaagcaaatccttcaacacgctctaccagcacacgaccataccaggtacggtcaaaaatggtaattttttcagcttcattaatacgattccaaaaacgccacaaatacgggtgtcttgcttcgaaacgttcaggcgccccaatacagtgaatatcatattcacgcgggtctaagtttttaacaattcgcttgatggctccccctttacccgcagcgtccatcccttcaaatgcaatcaccacattgcgtttatcaaagcgcatgttatcggcaatttttttactcagtttatcgagctcttttttatattcggctttatccattttttcctgagcaggttttaataaactctcgggaatttttgcctgctgccatttacctttgacttcagtttcatgttcaggcagttgacgcatgtgttgtaaaagatactgagcaaaaaattgatcgcgctgtttttcatcttccccatcaataatgtaccaatcgtcggtaaagcgacggcgtaacttttgcaaagtgtcatattgttttttattacgccagtctaggccgtgaagcttatgccaatgctgttcagatggatctattttatctaaccgtttttggagtgatttccacgaaagatcaaaccagaccttaatgacatcgacatagttattttttaggtcctgttcaaacgctcgcatattttcaacataggcatcaaaacgcgcatcatccaaaggttctgacacatgagttgccgtaaccaacaaatcgctataccagttgccaaacatcaccacaatttggccttcagtcggaataaatgctgaataagactgccagaatgcttcagagtctgtcagcacacgtggtgcatctgcttttacccgtagatatcttggatctagccactctcgaagctgtttaacagcttccccttttccagctaactcaataccactcattaaaatgagtgtgcttttggcattgggtttccctcggctttcttttaaagcatattgtgcttcaattaaatcaactgaaagctgttcttcgtctcgtatttcaaattttggttgttgttcactcatggtccactgctctaatctttttatttaatttcgccattatttaacttatgcgcttgggtgatgaattgctatacaaattatgtcattgcaacatgatttaacctgaaaattgacgcataaatcattttttttacatctactcgccatagtagaaggttacaatgcctcttatgattttttgtaaatagcccaatattagagccttacatgtctaaactcgctgcttttgatgaacttttacaacaatataaaacatttaattatcacgacaatccagtgctagcccaacgtttgcaagatgtacaaacatggctaaaagaacggatgaaagagacgcatcacgacttttttaatttgccagaacacaaactgatggctcagtactttttaaaccgtttatatggtggaccagagttcgatgcacttgcagcacaaattgaacgtttattgaaatatgcacataaagcagaaaaggttttacctgaaaacgcaattaagacaggtacaaagtcggtaagtttggctgtacttgccactcaacttgatgaacaagtagcaatgcagcttcttgaagactatccggcagatactgtacttaccgacgagatcatgcgcttaaccttaatcaagcttgatcaggccgaagcccgttaccagcagcttgcccttcttgacgatttaggagcagcactcgataaatatatgcgttcatttatgatgtttactgcttttaaaatgtgtaaaggtattgcacaaaaatatcacttcgaattgatgtatgattttattcaagatggttttagcgcaatgaaacctttaaaatcggctgaggcctttattaaaacttttacggaaaaagaacgccagattgttgaaaaagtacattcaggacatccgaatccgtttagagtgtgataaggtcggcacatagaaaaaactcaacctcacgaagttgagattttattcattatatttgcatgatgatgcctgtaaaaatagacaaaatctgtcatcatgcagaacttattccgtttcacttgagtttgagtctaggagagacaatatgtctaacgaaaaccaaaagccaacatctccaactgagcaggcacaaagttcagacaaagttagcccattcctaagctcaccgttaccgcaaggtacccctcaagggcaacaacaatctttacagcaaaccttaacagatacaccagttagcggttctgtgccgaaatacaatttaccacgtggtgcaggcaacactggcaacgttggtgaaacaacacactttggttattcaacagttcgaactgaagataaagcacaaaaagttgctgaagttttccactcagttgcaagcaaatatgaccttatgaatgacttgatgtcatttggtattcaccgtttatggaaacgctttgcaattaacatgtctggtgttcgccgtggtcaacatgtgttagacattgctggtggtacaggcgacttagcaaaagtatttagccgtgaagttggcccgcagggtcatgtggtactttcagacattaacgaatctatgctcaatgttggccgtgatcgtctaattgatgcaggctgtaccaatgtcgattttgtacttgccaatgcagaaactttagaaccttttgcagacaacagctttgaccttgtaaccattagctttggtttacgcaacgtgacagataaagacgcagcgcttgcttctatgttccgtgtgttaaaaccaggtggccgcttacttgttcttgagttttctaaaccagtatttgagccattctcaaaactttatgacctttactcattcactgctttaccgattatgggtaaattggttgccaatgactcagaaagttataagtacttggctgaatcaattcgtatgcacccagaccaacgtaccttaaaaggtatgatggaaaatgctggcttccagaactgtgattatcacaacctgactggcggtattgttgctgttcatcgcggttttaaactgtaagggataacgatatgtggtcgattctggcactcggtgcagtcgaacgtatcattcatcatctgatcgatctggatgcattaacccgcattcagctcaatcagctacagggcaaaatgttgcgtgttatcatcgatagcccgcaactttctgttgatgtattctttgaccaagaaaaagtacgtcttgaacctaccgttacagggcacagtgaaaagccatctatttttgagcagcgcccttttgatccacaatttaaaatttctgaagccactgcaactttgcatgtcaaagatgtcgttgaactgatcaaattattattaagcgatccagaccaaattggtaatatcccgcttcaaggtgattatcacctcttacaggatattcaaaaaattatgcagcaagctgaacctgatttagctgcgcatctatcaaaatgggttggtcctcaactcgctcacgaaatcggtaagatccaacttgcaccaaaacatttaaaacgctctcttcaaagtcatctattttttgctgaagatgccttaaaagaagacagtggtttatttgccccacgttgggaaatggacgatttaaatcaggctacgcgtaagcttaatcaagacattgatcgtctagaagctaaattgcagcagctcaatgcacaactacaacccactcaagactaggtaagactttatatgattccgcacgtttcacgtttactcgaactttggcgtattgcagcgcactatagactcgatacgttgttccctgcggatgaattacctgttaaagctaagcatgcattgaacattataaaaatgcatccggcagcatggtctagtcgtgaacgcaaaaatcctttaaagcttaaagaagctttagaagatatggggccgcttgcaattaagcttggacaactcctgtcaacccgccgtgatttgattccacctgaaatactcgcccaactggttttgcttcaagatcaggtcaaaccttttgatggagaagttgccaaacaacgtattcaagattctttaaaagcagacgtaaatacactgttcgcccgctttgatgatcaaccacttgcagcagcctcaattgcacaagtccatacagcggcgttacatgatggacgtgaagttgttgttaaagttactcgtccagacattcgtagccaaattttacaagactttgaaattctggcttggctaggtaacaccttagaaagtcgtcttgaagctgcccgtgcattacatttatctgaaattattcaagactaccgccaaatcattttaaatgagctggacttgagtattgaggcagataacacccgtcgtatgcgccattacttcactggttcaaccatgatgtatgtgccagaagtctacatggacaccaaagatgtcatggtggctgagcgtattactggtgtccctatttcagatacggcaacctttgaccgtttaggtatggaccgcgcacaacttgcagaaaaagggttaaccattttctttacgcaagtattccgcgataactttttccatgccgacatgcaccccggcaatgtctttgtagaaaccatcaacccaagcaatccacgctttattgcactggactgtgcaattatgggtgagctttctaagcacgaccaaatgacagttgcccgtatgttgcttgctgtcatgaacagcaactttatgcagcttattcaaattgtgcatcaagctggctggattccaccgggtacagatcaagacgcgttagcacgtgaaatgcgccgcactgttggaccaatggtgtctaagccaatggaccagcttgattttgcgggtatcttaattcaagtgatggatattgcccgtcgcttccatttagaaatcccgccacagctcatgctactactcaaaactttagtgcatgtagaaggcctaggtacggacctttatccgcagctcgacatctggaaattggcaaaaccaattttgacagaatgggtcaaatccaatatgaacccagtcaaaaatgtaaaagagcttggtcagcaattacctgatctgcttttaggcgctcaagatttcccaagtttaattattgatagcttaaatggtttaaaaaatcagtctgcttggcaagaccgtcagttacgtgaaattcaacagcttcgtttacaaatggaacaccaacaacgtcgtagctggatgtttggcagtactatgttgattttgctaactattgcgattattagcccttggtttgtatctattattttgattgtgttgagcagcttattggcgctttggcgtgtattgaaataacttccaagtcccttgcccatgcaagggatttttttatgggtaaaacttataatttaaaaaaatatagatcgattatccgttcattgctaaatttagttttatgaatgcttgaaaagaacaaacaatgaaaacacctcattttgccattattggtgcaggcacggcaggtttagccactgcgattttgctcgcccgtgaaggcaaccacgttactatttttgaacaagttgatgagttatctccggtaggtgcaggtttactgctacaacctgcgggcttagccgtatttgagcacttaggtgtgctcgacaaagccctaaccttaggtgcgaaagtcacaggcttagaaggacaacttccagacaagcgtcttttagttaacagtcactatcgcgaagcatcaacaaatctttatggtctaggtatacaccgagccactttgtgtcacgttctcactcaaaaacttaacgagtattcaagccagattacttggtatatgaaccattctgttgaaagatttgaagaacataacgatgaagttcagatatttggcagtcatcaaaatcaaaagtttgatgcttgctttgatggcctactcattgccaatggtgctcgtagtcaattaagacctaaagcatgggtaaaggttaacaaagcttatccttggggggctgcgtggagtatcgtgcccgagtgccaagtcctcgatcctgaaattctgcatcaattttatgatcgctcgaaaattatgatgggaattcttcctacgggagcgattccaaccgaacctcaacagcgcctttcaagtgttttttggagcttaccaaccccacaattacaaagctttttgcaagatgagcaggctaaacaagcttggttaaagcaagtctcagaacgttggcccaaagttgcagagtggctcaaagaaattttgtataactgtcaaactcagcccaaatggctatctgcaaactatcgtgatgtcgtcatgactcaatttggtcaaggtcgaattggggtaattggagatgcagctcatgcgatgagcccacagttgggacaaggggccaatatggcattattagatgcttgggctttttctcaatcattgcgacaagctcaaaaaaaccagaatattgattggcccctactctggcagcattatcaccagtttcgcggttcatctacccagttttatcaatttcttagccgcttactaacaccactttatcaatctgaccattggtgggcgggaggtttaagagatttagttttcccttggatgtatcaaattccttattttcgaaaagaaatggccatcacaatttcaggcttaaagacagggccattccgccatcttgaatatgatcaagtagctcaattacctaaagaaagcagtacgtttcatttaaaaagtgaatctctggctgatttttaaaagtagctgagtacaagctgctcattacgctaggagagtcaaaaaggacaaagaatttttccgcaaagtggcgttgatgccgtacactatacaagctatttttagcatctgactgaaatcaatttatagttcatatttctttggtgattcctcatgaataacacgcaatggctcgatgaagtaaaatttaacgaacaaggtcttatccctgccattgctcaacatcatcaaaccggacgtattttgatggtggcgtggatgaaccgtgaatcacttgcactcaccgcagaaaaaaatcaggctgtgtatttctctcgctctcgccaaaaactttggcacaagggtgaagaatcaggtcatttccaaacggtttatgaaattcgtctggactgcgatggcgacgtgattgtattacaggttgagcaacatggcggtatcgcatgtcatacaggtcgtgagtcttgtttctaccgtaaactcaccccacagggctgggaaattgtcgatgcacagttaaaagaccctactgcaatttatggcgacaaagccaaagctgaaagccacgatcatgctcatactactgaacaagtggatgtacttgctcacttagggcaattgatgcaagagcgtaagcaagcagaagcagacacttcatatgttgcaagcctctacaaaaaaggcatcaataaaattttagaaaaagtcggcgaagaaggcgtagaaaccattattgctgcgaaagactacgctgctcaaaatacagaaagtaatttaaatgacttgatttatgaaactgccgatttgtggttccatagtattgtcatgttgggttatttcgatcttaatccacaacttattattgacgagttaggtcgtcgtcagggtttatctggtttagttgaaaaagctaaccgcaataaggtttaaaatcactcagtgtcgaatatcgaaaaacctaaagccacctatgagcaagcaattgccatagataacgcacgtcttgggcaatcatttaaagtgattgcctatgcgggcacaggtaaaactactacattacaaatgattagtgatgccatgcctgaacggcgtggtatgtatttggcttttaacaaagccattgctggtgaagctcaaaacaaatttcatcgcaatgtagactgccgtacttttcactcactcgcctttcgcagtgtgccacgtggcgtaactgataaattacgtttaccccgcttaagcccaagctttattgcaaaagaatatcggctagaaccgattaccttacggcgcatgatgggtggacgttatgaaaaatacgtcttaatgccaagtcgcctagcgagtcttgtcgccaatgcggtgagctatttctgttcaaccagttctcaatatccagcgcctcgacatattcaggcgccaaactggttacatccagacgatattactgcacttcaaacccatctttaccctgctgttgaacgccgctggctagagtccatcgatccaaaccatcaagccggaattggtcacgatatttacctcaaactttgggcattgtctgagcctaatattccggccgattatgtcttatttgatgaagcacaagatgctgaccctttaatgctgggtatattacttcgtcaaaaaagtacgcaggttatttatgtaggcgatgcacatcagcaaatctacgcgtggcgcggtgcagtaaatgccatgcaacaattgcctttgccagagtctcgcctaacgacctcttttcgttttggagaggcgattgccgatgtcgccaatgcgttgttaggtggcttaaatgagacagttcctttgcttggtaatccgaaccagaaatcaagtgtagtcaataaacctcatacaaaaatgcgtgatgcgattttgtgtcgtaccaatgctcgcgcaatggagctgttattggcaggcttagttcacggcgataaagtgagtttgcaagctgaccatcaaaaactaaaccgttttgtagatgctgcaagcctcttaaagcaagggaaacgagttactgacgttcctgagttggcatggtttaactcatggcatgatgttcatgagtactgcgaaaccaatgaaggaagcgatataaaaccattggttaagctggtagatgatcacggcactgacccattaaaaaaagcacttgcaaagattactccccttgagcaagctgactatgtcatctcgactgcccataaagcgaaagggctggaatggaaccgtgtccatattgaagacgactatcaatttaaaattaatggtttagagcataagattacagatgaagagttaagattactgtacgtggcctgtactcgtgctaaagtaagtctaaatatccatcatctttatgatctgatacaacaattaaaactaagggcgcctttaagtcttcgtcagtcggttggttgaagcgctcataattaggtgagcctatgaaacttgaatctatccaatttaaacatattgctctgtttcatgacctaaaaatacagttccaatatgacaaacaaccgattactttaattttaggcgagcaggcgactggcaaaagtatgctactcaagcatatttatcatgctttaacatggtttcctgcgcgccttaaagatgcacgtacaccaggcattgtcatgccagatcaggacattagccattctcgtttgcaatctaaaatagaagtcagcatccagattccaccggaatttggacaactccctgaaaccgcttcaacccagcaaaccgacacatccctttgtagctggaagctgttcaagaccttaaattcaagtggtgtagggattagtcaagttgaaactcagcagctcgatcaaaccattaccctttatcatcaagtcacaagaaaagacccacttcaaggtcttcccttactcgcttattatccgtcagagcgatttgttaacgatataaatttactgaataaaaatttaccgggtattacccagtctatttctgcttatgacattagcttcattccgtttaccaccttcgcccgcttttttgagtggttacgtgaaattagcgatattgaaaatgcacaagcggctcatgttgtgcagcgaattatttcaaaacaatccaattcacaagatcaggaagaaattttacgtcagctacaacttgaattggcaggacatcctaaacagcttccttcacctaatttgtacgcattaaaatcgacattaaagattatttttcctgagcttgaagacttttatttgcaatatcacccaaaacttcaacttatggcacattacaagggtgaagtcttggcctttcaacaactttccaataccactaaaacatggattgcactcgtaggcgatgtggttcgcaggctttgtttgctcaatccgttgagcttagacccttgtcttgaaggtgaaggcgttttgttaattgaccagatcgattcacaactagatgcagcacattgctcagaaattttaaatcgtcttcatcgcgcattcccacgcttacaaattattgtgaccggaagccgtgaagaattgcttgaacatgcagccgtatatcaatgttttaaattagagcatggaaaaatcagtccacttgatttaagtacgactcagcagcaactcgaacatctttatacgttattacaacgagatgaagcgttaacgccgcatatagatcccctaccgcttgataccgagccagcaacaactcaaattgatagtttgtaccaacaaatccaaaatctaaatgaacagcaaaaaaatgaattattacgtatgattcatgcaggagacacctcggaagaaacctcctctctttaaaatttattatccatttcgctcaatttttataataaaaccgaattcgctaaatatatgatgaaatctggttttttgagctggaaaatcactagatgttgttaccacatgtaataacatcagatttttaatgattttttagtgtacaataaatttcattttgcgtttttattattcaagttgcgcaatacaacttgtttctcgctttatttttctaatttggtcgggttttcagaatataagctttggaaatctctttgaattcctatctattctgaaatgaaaatttcacctttaggcttcggtctaaattatatatggatacgagtgtgctaccgataattatcttattaccgttaatattaggcaccacccttgtttcattgcttcaacggttttcacgtggagtaacggctttaggggcgatcggagtcagtttaaccagttttggtttattactgactcaggctaaaactgtgcttggtggtgcaagcattcaacaaagttgggattggttaccacaattaggaattaatctgagctttagacttgatgcccttggtttattattttctcttcttattaccggtatcggtacactcatttatatttatgcctattattatctaggccctaaaaattcattaagtaaattatatttattactcatgctgtttatggcagcaatgctcggtatttctctttctaacaatttaattattttattagtcttttgggaacttaccagtatttcatccttcctattagtcggttactggagccattacgaagctgctcaacgtggctcgcgtatggcacttaccattacaggtatgggtggactcgccatgctaggtgggtttgtcttattaggacaaatcacaggaacctacgaaattaatgatattgtcggaatgaaagacctcattcaaagtcactatctgtttgttccgacgcttttgcttattttactgggtgcatttactaaaagtgctcagttcccgttccatttttggttacccaatgcaatggcagcgcccactcccgtgtcggcctatttgcactctgccaccatggtaaaagctgggattttcttattagctcgtcttgcacctattttcattggcgctgcgctttatcacaacattgtcacgtttgtcggcctatttacactttgtatggccgcatgcttcgcaatttttaaagaagatctaaaagggctactagcctattctacaattagtcatttaggtcttatcgtttgcctgcttggtattggttcacctttagctgttgctgcggcaattttccatattattaaccacgccacctttaaagctgccctgtttatgattgccgggatcattgaccatgaaacaggtacacgtgaccttagaaagttaagtgggatttggcaactattaccgtttaccgcaacactgactatgattacagcggcatccatggcaggtgttcctctcactaatggctttatttctaaagaaatgttctttaccgagctattagcgagcctttcaggatcaactgttatctttgccagtattattgcgacgcttgccggtatttttgcagtcagttattcaattcgcttagtacacggcgtattttttgatggccccgtaggtaaacaagttccaaataaaaatgcccacgagccacctatcggcatgcgagcaccagctatattgcttgcgacactatgtattttggtcggtattttccctgccctactggtcgagcctctagttaacagtgtaacacgtgcaagtcttatgcaacctgattttgcaggtactcatcttgcaatttggcatggatttaatgcgccattaatcatgagtattattgctctggttggcggtacgcttttctattttgccctagcaaaagatggcatgattcgtaagatcgaccttgacccacgtttagggcgcttacaaggccgtattttatttgacttattcttaaagcatttattattaacaagccgaaaaattaaacaaaaaaccgaaaatggttctttgcaaagttacctgttcttaatcattgcttttagcatcgtcatggttactctgcctttgttcaatcagggccttaccacaggtacacgtgagctgactcacgcaccatggattgcagtagttctttggctgaccttattctcaggttgctggatgatgctttggttccaccacgaacgtatcaaggctgtactcattagtggtgcaattggtcttgtggttaccatggtatttgtcaccatgtcggcacctgacttagcactcactcaaattacggtagatgtagttacgactgttctgttgttgatgagcttatcgttactccctcaacttacgccatatgaatctcgtcgctcaagacgttggagagatgctgcgttagcaattattggcggtttaggaattggttggattacatggcttattttaacgcgtgatcataattcgatttcatggttctttgctcagcaatccttaccacttggcggcggttcaaacattgtaaatgttattttggtggacttccgtggctttgatacctttggtgaaattacagtactaggcattgctgcgattggtgcgctatgtctcatggatggcatgcgcgtacatggcaccaccatgacccaaggcctcacctaccgttttaacccatctccactcatgttccgtattacggcctcttgggtgttacctttagcattggtcgtaagtgtctatatctttatgcgtggacacaactacccgggtggtggctttattgcaggtctaattacctcaatggcactgattattcagtacattgctttaggtcaagatcaagcagaacaaatgttaaaagcccaatccggtcgtctttacgaaatctggattggctccggattaacaattgcaggccttactggcattgccgcatggttctgggcacgtccattcttaaccagtgcgcacgtctatgttgaattaccagttttaggtaagttgcatctggcttcagcagcaagctttgatctgggtgtgtatatcaccgtagtaggcgctaccatgctactcatttctgtattaggggactctcgccactcgagtatgtctggtcctgtacctcatggggagaaatcatcatgatcagtttagaattcttactggccactgccattgggctacttgttgcgacaggcatttatctaattttacgtgcgcgtaccttccctgttgtgttgggcttagcagtgctgggctatgcggttaacttatttttgtttgcgatgggtcgtttgcaagtcagctcaccagccatcctaaccgaaaccaccaatattacagatccacttccacaagcacttgttttaacagcaatcgtgatcggttttgccactaccgcttttattgtgcaactcgcattacgtagccgttatgaatccggtagtgaccatgttgatgccaaagaagatatttctccaacatacgacccacgtgaggatgagccgtgatgtttgattttttatctttttggcaagctaatacaccaattttcagtatcctcatcccggcatttactggttttatcttattgcttctaggcaaccctggcgctggtgcattaaaagaagattggcgacaaccttggcgccgtggcattagtttgatctcagcaatagctgggttaatcactgctgttagttatctgcttgttgcaaacactggccaaattacggtttatcagttgagcgagtggtcagctccctttggtattgtgctggtactcgaccgcctttcagcttttatgctggttttaacttatgccttagcagttccggttttatggtatgccagtgaaaactgggatacgagaggtcgctatttccacgccatattccattttcttttaatggggctatgtggtgcatttctcacaggcgacttatttaacctgttcgttttctttgaaatcttgctcatggcgtcctatgtcctcttattacatggacaaggaaaaccgagatttcagcttggtgtacactacgtcattatcaaccttttagcctctgccctgttcttaattggtcttggcatgatctatggcagtgtaggtagcctcaatatggctgacgtttcacgtttgctaccgactttagatgcagatcaacataaattagcagttgcaggtgccttactcttatttgtcgtgtttggtattaaagcggccatgctaccagttggtttttggctaccaaaaacttatgccgttgcaagtacacctgtcgcagcaatttttaccatcatgaccaaagtggggatctatgccattttgcgtgtcaatggaactgtatttaatgatgtactcagccaagaaatttttaaaagctggttgcttccaattggtttagtgacttctttatatggcgtgattggcgcaattggtgcagatcgcctcagacgttttgttggctttatggtgctgtcttcaattggtactttattgattgcaattgccatgtcaaacacgcaagcgtggtctggagcattattctatttagtccacagtacattgattggtgcagcattttacctgttctgtggctggatgacttcacagcgcggtgattttaaagaccatttaaagattgcaccgagaattaaacaagaaaaagcagccatgctgacttatttcctgattgccatgatgctcgcaggcttaccaccttttagtggcttctttgggaaagtatttattttgcaggctactgttgaaactgcatatcaaggctgggttattggtattgttcttttggtgagtttattaagcattattgcattaacacgtgtcggctttattttattctggcgtgcatcaccaccagaagaagacccgatcaatcctgcttatattatttatcgtgctttacctgaaaaagcaccgccacgtaacgataccgtcatctatatcttacttgccggtttagtggcttatgtagcatttgcttcacctgtattgcactacaccacaaataccgctcagcaaattcaagatcatgccctgtatcagcaatctattcttaaaactgatcaaaatggcgaagttattagtgttcagccatatgactcaacttatttaccagaaacaaaatatggtggtgaagttgaagatcataatgcctatcttattcctgacattatttcgaaagatactttcaacggtgagcatatttctgaatataaacaccgccaaattcagcagcaagaaaaattgcaaaccccaaccattgctgatgaaagtcaactgaaacctatggagccataacaatgcagctatctaaattgcttgaccgctggtttccgcatccatttgtttcttttttgattatcatcttctggttaatgctcgcgcatagtcttgatgcgagcgacctgcttatggctgtaattttggggcttgttattcctcgtctagttcgtccttttattaccagaaccccgcatatccattggaaacctgccataaaactgtgttttgttgtcttgtgggatattattgtttccaattttcgggttgctaaactggtattagggtcaccgaaaaaattacatcctaaatggtaccgtgttccattagaaacagaacatgaacaagtaaactctttactggcaatgattattaccacaacgcctggcacggtctctgccggtattgatcaagagcgtggtgatattttggtccactctcttagcacagaaaatactgaaagtgatgtgcaagacatcaaacaacgctatgaggctccactcatggaaatttttgatgtgaaaagcaaatcggaggacaacgcatgaccatcctaccttatgctcttggcattagcttggttgctatcacaatctctatgttgctttgcttatttcgaatggtgatgggaccatctattgtcgaccgcctactagcgcttgatacactatttttaaatgcgacctgtctcattattgtgttaggcatttattggacaaccacctctttattcgaaggggcgttgttagtcgctatgctagggtttgtttcaacggctgctttagctcgttattttacaaccggtcatgtaatcgattaggggaaggtcaaaatgcaaattacaatggaaattattgtttcgatctttctggttttcggtgctttttttatgttagtcggatctatcggtatggtacgtctacccgatttattcatgcgactacatgcacctaccaagtcgagtacattaggcttaggtagctttttaattgcttcaatgatcttttttgcttttcaaggccgatttggctttgccgagttacttattacactgttggcttttattactgcacctgtatcagccaacttaattgctcaagccgcgctacatttacgtttacgctcattgagtggtgaagttcctgaagctattgaacgtcctctaccgtgggatcgttataaaattgggcaacgtttttcacaaaacaaaccacccatggaaccgcctcaagaataaaaacttgaacacataaaaaagccaccccaaggtggcttttttattttgagtttttattactctttgtcatctgactcacgtttcggtaaatcttgtaccgctttttcgataagaccaaacatatagttaccatatgcattggttttatcgtaatggaaacgcaagcgaggcgtgatgcgcgttttaatacgacgactcaactcctgacgtaaaaaaccagatgctttattcaaaatatctagtgtttcacggtgagccacttcgttttggtcatcgcttaattcacgacccatcacggtcacatagacatcggcataacctaagtccggactgactttaacgcctgagatggtcacaagaccacccagacgcggatctttcaactcctgacggataagttcagaaagctcgcgctgtactgaatccgccattcgctttaagcgttgtccacccgccattaaagactccgtttaaccatttgaacatcataaacctcaatcttatcaagaggtttgatgtcgttataacctttcacggcaagaccacattccataccggcacgaacttcatcaacgacatctttataacgacgtaatgattcaagttcaccttggaaaatcacaacatcatcacgtaagacacggattggtttgttacggtgaatcacgccttccataaccatacagcccgcagcagcaccaaacttactagaacggaacacttcacgtacttgagcaacacccaagatagtttcacggtgttcaggagcaagtttaccgctcatggcatcttttacatcatcaatcaattcatagatgatgctgtagtaacgaatatcgataccgtcttggtcactcttctgacgagcagctgtatcagcacgaacgttgaagcctaacaatacagcttctgaagactctgcaagaattacatcagactcagtgatcgcaccaacaccagaactaattacgcgaacttttacttcatcagtagagagttcatgtaatgcagcattcaatgcttctaaagtaccacgaacatctgttcttaaaacaacattcactgtaggaacgtcttttttgcccatagatgccatgatgttttcaagacgcattgcgctttgacgttcgatacgtttttcacgttcacggtctgcacgagcatcagcaacttcacgtgccttcttctcgtcatttactacaagaacttcatcacccgccattggagcttctggtagacccaaaatttccactggaatagatggtcctgctgacttaatcggcttaccgttttcatcagacatcgcacgaacacggccatatgatgaaccagcaagaacaaggtcaccaatatttaatgtaccgttttgaacaagaatcgaagttactgcaccacggcctttatccacacgtgcttcaataacaacaccttgtgcagcaccttcagcagatgcttttaattccatcaattcagattgaatcagaattaaatcaaggagttcatcaataccttggccagtatgtgctgaaaccttagcaaccggaacatcaccgccccattcttctggaacgatttctttggttgttaattcatttaacacacggtctggatcagcagattctttatccattttgttgatagcaacaataattggagttcctgctgcacgtgcatggtcaatcgcttctgcagtttgcggcattacaccgtcatctgctgcaacaaccaataccacgatatccgttgctttagcaccacgtgcacgcattgaggtaaatgctgcgtgtcccggtgtatcaaggaatgtaataatccctttgtctgtttcaacgtgatatgcaccaatgtgctgggtaataccacctgcttcacctgccgccactttagaacgacggatacggtcaagcaatgatgttttaccatggtcaacgtgacccatgattgtaacaactggaggacgagtagtttgttcaccacgtgcttcttcagctgcttcaagtaagttatcttctgcttgtgtatcagaaactagaacagggttatgacccatttcttctacaacaagtgcagctgtatcttggtcaattgtctggttctggttaaccaattcacccattttcataagtgtcttgataacttcacgtactttaatcgccatcttctgagcaagatcggcaacaacaatgcttgaaccgatttctacatcatagacttgctttttaactggcttttcaaaaccatgcttgttcgcttggcttgattttaaaccacgtttgttatggttaacgaagctttgctcttcttgaccacgacgaccgcctttcttaccagcgcgagggttagttgtagcaccaccacgtttaatttcacggtcttcttgattaaatgaatcttcataagcttggccaacaagacctgaagcaagaggagaatcatcaatcacacgaatagttgcagtagcatcatcatttgaatatttagatgccatcttacgcatttgttcaagcgtacgctgctgagcttcctcagccgctttacgacgtgcagcttcttcagttgctttcaactgagctgtttgtgcttcacgcgctttcttttgctctaatgtttctgctggttttggtgcaggttttactgtaccaccaccacgttttttcactacaacagcagctttaggagctgactgtgcagcgctatcttgttgatgagcagcacgcattgcatctaaagttgcttttgctttttgctctgtttgaagacgcgctttttgctctgcagcttcacgcgcttgttgttctgcacgcgctttagcttccgcttctgcacgcgctttagcttctgctgcaatttgttctgggtttggtttagcaaaaacctgttttttacgtacttctacgttaatagtttttgctttacccgaagtacttgcaactttagcggtactggttgttttacgtttcaacgcaatttttcctgtgttaccactttcctgaccatgcacctttttcaaataattgactaaagtgtcctgttgttcagtggtaataatgtcgtctgctgtacgttgaggcaaacctgcttcacgagcctgttctaggagcttctcaacaggacgtcctacgctgagagctaactctttaatcgacttgtccgtcatatttcatctcctagttaaaccatgattcgcgagctttcatgatcaattgacctgctttatcatgaccaagaccttcaatatcagaaatatcgtcagttgcttgatctgccaaatcatcaacagtaataataccgcgagcggctagcgagtaagcgatctcagaggtcatgccttccatattgagaaggtctgcactcggttcttgaatattttcttgctgtttcaatgcatcagttaatgcagcttcttttgcacgactttgcaataactcaactaactcagcgtcaagttcaatttcgtcaaaagtttcagctggcacataagcaatctcttctaaagaagtgaagcccatctctactaacgccattgccaagtcttcttcaatatctaaacgtgacacgaacatgtcgagatattgctgagcttcattctgctgacgagcacgatactcttcttcaagcatcatgtcgagtttgtagccagttaaatcagaagctaaacgaacattttgaccttgcgaaccaatcgcacgtgccaattgatcgttggtagcaaaaataatgtctgcactttttgcatcttcatcaagcacaatgcctgatacatcagctggttctaatgcacttgcgatgtattgagctggatcatcagaccaaactacaacatcaatacgctcaccatttaactcttgctgtaccgcttggatacgtgttccacgcataccaatacatgcaccaacagggtcaatacggtggtcgttcgtttttactgcgattttcgcacgaacacctggttgacgcgccgcagctttaatttcaataatttcttcagaaatttcaggaatttctttcttcatcaaagcaataagcatttcaggcttagcgcgtgataatagaagctgagcaccacggccttcacggtttacactatataaaatagcatttacacgttgttttggacgaagaatctctttaggaatcatttcttcacgagctaaataagcttcagcattgtcacctaagtcaatgatgaaaccatctttagtttgctttttcacttcaccgtaaattagctcgccaacttttgattcataagcatcagcaactaatgcacgctctgcttcacgaattttttgtacgataacctgtttcgcaatctgtgcagcgatacgaccgaactcaatcgattctacttcaagctcacgaacgtcgccaattgaccattttgcaggatcaacatcagaaattgcgtcttggcatgctggcatttcatgatcttcatctgccacaacagtccattgacggaatgtacggtaatcaccagttctacgatcaatttctacacgaagctgagcttcttcagaattggtaccctcgtaaaattttttcttcgttgcagcaactagagcttgttctaaagcttcgaagatcgcttcacgactaacacctttttcattactaaccgtttcaacaacggtaagaatttcgcggcccataagtcacctaccgatttcttatataatttaaataaatttaatcttgatagatcaagtttgctttatcgatattgttgctgtcgatatcaagcacatgctttccttcaacttcaacctgaatctcttcattttcaaggtctacagcaaggagttttgcttgaaatttacgacgattttctactgcagcaatcaaacgcaaagcaacctgttgtccaatgtagccttgcaactgttcgagttgaaaaaatgggcgatcccagcctggtgaagaaacttctaatgcatattcacctgaaatcggatcatggacatccagcattgcgccgacctgttgtgtaacacgaacacaatcttctacaccaataccgcggccttgctctacttcaccatcttcattaatcactggttcagcgttttcatcaaccggtctatcgatataaatacgcaataatgaacgcttaccttgtggaaggaattcaattccccaaaggtcgacaccacatgcctccactgctggagcaatcatgtcatacaatgcttgggatttatttgataatttcatttactctcgtcattctcgtgcgattcaatcggttgttttaaccgacacagacttactatagtgaagcatgactatttgaccaattgatgtcgacactacacgatagcgatacgataaccaataaaaaagggcgttaatcgcccctatatagcacagaaaacaatagtccactgtgcaaaaaggcccaccttgtctgtgagcctctttaagaaacttggtagcgggagctggatttgaaccaacgaccttcgggttatgagcccgacgagctaccagactgctccatcccgcatcaacgtgcaaaaattatatacaaatatcgaaaaaagtcaatgtaaacttatccaatattagcttgattaagttgcaccttaatcaaattggtagcgggagctggatttgaaccaacgaccttcgggttatgagcccgacgagctaccagactgctccatcccgcatcaaaaacaaaactgcttgcactcaactttctggttcaaagttggtgcggaaggggggacttgaacccccacgcccgaaagcactaccacctcaaggtagcgtgtctaccaattccaccaccaccgcagcttgtgggacgcattctagtcctttcaattccaaaaggaaagtcttatttccaattattggccagtttttggtgcatttggtgaagtttcaggcgatgtagtctgcactggcacagtcgtttgtacagttttcaaactatatgcttcagtcgtttgcttcttggcaaaaacagccagagtcaaactggtcacaaagaataaagctgtcaaaattgcagtcacgcgagtcaagaagttacctgaaccagacgcaccaaatactgttgctgcgccacctccaccaaaagaggcacctgcatctgcgcctttaccatgttgcactaaaattaatgcaatcatcagtactgctaaaataatatgtacaacaagtacaaaagagtgcataccctatcctcgttatttgctttgcgcgaaggcttgtacaatttgataaaaagatgctgcatttaatgaagcaccacccaccaacgcaccattgatatctggacatgcagctaactcaacagcattttcagcttttacactaccgccatataaaatagcaatatttgagcctgctggtgtaagttggcataagccttcacgaattttagcgtgcatcgcttgcgcatcttgcggagaagctgttttacctgtaccaattgcccaaataggttcataggcaataaccacttggttttgccattgttctgcagtaactacaggtgcaatatcacaaatttgctgtagaacaacttgctcggcctgaccttgctcacgttgttcaaggctttcgcccacacaataaatgacagtcatacccgcatttaatgcattttggagttttgccttcaaaatttcaacgttgtcaccaaaaatatcacgacgttcagagtgtcctacaagtacgaaattaatttggctatcttttaatagttctgcactgacttcaccagtataagcacctgtaccagcaacacgtgatacatcctgtgcaaccgtatataccgttcttgcagcatcctgtaattgcgcttgtaccgttgtaagagcaatagaaacaggggcaacgcccacatggcagttttcatctgcaatttggttttgttgcaataattgtttaaattcttctataagttggttggcgttggcacgcattggattcattttccagttaccaactacccaaggcgtaatcgtcgaacccgacatactgctcacctttcatcaaaaatgcagcacattctacacgcatttatacaaatttcagatacttttctttaacgtgattactcatatcttttctagtgtttgaaattaagaaaaaaactttactttattaaaagtccgacattctaaaaattaataaagaaaaacttcgactggttcaagctttaataggctgagtaggacccgagcaacactttctaaggtagtaattttacataacaaaagtataatttttcatataccaattataaacacattaacataggcaggcagatgtcagcattacatacatctccaaaatttacggggttttttcgacgtttagtcgaagaaaagcatgtgtcggcagcgaccatgcaaactgcattagatgcagcgaaaagagctaagcaggacacagtcgcatatttaattgaagaggttcatctctccccttcgttattggctgaaacaatttctgctgagtttgctgaaccatatttcgatctggatgtttatgacacctctcagattcctaaagatctggtcgatcagaaactgattttaaaacatcgaattttgccgctcattcaaagagggcaaattttatatgttgcgaccagtaatccaagcaatatcgaagcgattgatgcaattcgttttaatagtaaattgctggttgagcctgtaattgtggagcaccataaactcgaaaaagttttaggccagcattttgcagaagaaagcagctttgacttcaatgatgaagagtttgatctcgatgttaatcttgatggtcctaccactcaagaagatgaagaagaagctcctcaaggcgatgaagccccgattgttaaatatattaataagttattaattgatgccattcgtatgggtgcttcagacttacattttgaaccgtacgaaaaatcctatcgggtgcgctatcgtgtcgatggcatgttacgtcaaattgccaatccccctctacagcttgcaaaccgcttggcatcacgcttaaaagtaatgtctcaaatggacatttctgaaaaacgcgtcccacaagatggtcgtatcaagctcaagctgtcaaaaagcaaagcgattgattttcgtgtgaactccctcccgactttgtttggtgaaaagttagttctacgtattcttgacccatcaagcgcaatgctaggaattgatgcactaggatatgaagaagatcaaaaagctttgtttatggaggcattagataaacctcaaggcatgcttttaattaccggaccaacaggttctggtaaaaccgtatcgttatatacaggtttaaatattttaaatactgaaagctccaatatttctactgccgaagacccggtagaaattaatcttgaagggattaatcaagttaacgtaaaccccaaggtagggcttacttttgcggccgcacttaaatcatttttacgacaagaccctgacattattatggtgggtgagattcgtgacttggaaacagcagaaattgcaattaaggcggctcaaaccggccacatggtgatgtcaacactacataccaatagtgctccggaaacattgacccgtctacgcaatatgggagttccttcttttaatattgcaacatcagtaaacctagttattgcacagcgtttagcacgtcgtctttgttctcaatgcaaaatacctgctgatattcctaaacaaagcttattagaaatgggctttaccgaacaagatttagcgcacccagattttcgggtttttcagcccgtaggttgccctgaatgtcgtgaaggctataaaggccgtgtcggtatttatgaggtaatgaaagttacacctgaaatttccaagattattatggaagatggcaacgctttagaaatcgcagctgcttctgaaaaattggggtttaataatctacgtcgttcaggtttaaaaaaggtgatgcaaggggtgacctctttacaagaagtcaaccgtgtcaccagtgaataagacactatttaaaaaataaggataatctaatggctgtcaaaaaggcacaaatgatgccgacttttgcttatgaaggggttgaccgtaagggcgtaaaaatcaagggagaacttccggctaaaaacatggctttagccaaagtgaccttacgcaaacaaggggtgactgttcgaaatatacgtgaaaaacgtaaaaatattcttgaaggtttattcaagaaaaaagtcaccacactcgatattacgatttttactcgacaattggcgaccatgatgaaagctggtgtaccactcgtacaaggctttgaaattgtagctgaaggtttagaaaacccggccatgcgtgaggttgtactcggtattaaaggtgaagtcgaaggtggtagtacttttgcctcagctttaagaaaatatcctcaacattttgataacttgttttgttcacttgttgagtctggtgaacaatcaggcgcactcgaaacgatgctggaccgcgttgcaatttacaaagaaaaaagtgaattgctcaagcaaaaaatcaagaaagcaatgaaatacccggcaacagttattgtagtagccattgtggtgaccattattttgatggttaaagtagttcccgttttccaagatttatttgcgtcttttggagcagatttacctgcatttacgcaaatggttgtgaatatgtcgaaatggatgcaggaatactggttcattatgattattgcgattggcgcagtcattgctgcctttctggaagcaaaaaaacgcagtaaaaagtttcgtgacggcttagataaactggcgcttaagttacctatttttggggacttggtttataaagcaattattgcccgctatagccgcacgcttgctacaacatttgccgcaggtgttccacttattgatgcattagaatcgactgctggcgcaaccaataacgtgatttatgaaaaagctgtgatgaaaattcgtgaagatgtcgcaacaggtcaacagcttcagtttgctatgcgggtctctaatcgttttccatcgatggctatacaaatggttgcaattggtgaagaatcgggtgcactagacagcatgctcgataaagttgccacttattatgaaaatgaagtggataatgccgttgatggtttaacctctatgatggaacctttaattatggcaattttaggggtgctcgtaggcggtctggtaattgctatgtatcttccaattttccaaatgggctcagttgtataatgcaagacatcattgcgtattttattcaaaacttaactgcactttatattgctgttgcactcgtgagcctatgtatcggtagctttcttaatgtagtaatttaccgcacgccaagaatgatggagcaagattggcagcaagaatgccaaatgttactcaatcctgagcaaccaattattgatcatgagaggttaactttaaataagcctgcttcatcgtgccctgcatgtcagcaaccgatccgttggtatcaaaatattcctgttataagctggcttgtgttaagaggaaaatgtggccattgccaacacccgatcagtattcgctatccagccatcgaactactcaccatgctatgttcattagtagtagtcatggtatttggcccaaccatacaaatgctttttggactcatcctcacatgggtactgatagcccttacctttattgatttcgatacacaattattgcctgatcgctttaccctacctttagctgcgctcggcttaggtattaatacctttaatatttatacctcacccaactcagccatttggggttatctcattggtttcctatgtctttggattgtctattacttatttaaagtgatcactggcaaagaaggtatgggctacggcgactttaaattgcttgcagcattaggagcatggatggggccattgatgctgccgttaattgtgttattgtcatcgttaattggcgcaatcattggcatcattttattaaaattaagaaatgacaatcagccttttgcttttgggccatatattgccattgctggttgggttgcctttttatggggtgatcagattatgaaaatttatttgggaggttaagatggcttttattctgggaatcacaggtggtataggcagtggtaaatcagctgcaacacaatggtttgaatcccaaggaatccaagtcgtcgatgccgatattgttgctcgcgaagtagttgaaaaagggcaacctgcccttcaaaaaattcaacaaacctttggagattgggtgcttcaacccgatggcagtctggaccgccgtgccttacgtgaatatatttttcaaaatccacaagcgcgtcatacactcgagcaaattacccatcccgcaatccgtcaatctattattcaacagctacaaaatcctaaaagtccgtatgtgattttagtttcgccattattgtttgaaacaaatcaacatgaactggtcaatcacacgctactgattgatgcgagtgaacaaactcaaattcagcgtgcgagccagcgcgatggacaaaaccaagaacaaatccagaaaattattgctgcacaaatgccacgcgaacgaaaacgtgagcttgcaaatgacatcgtgtttaacgacggattactcgaacatttatatcagcaattagagcctttacatcaaagctatttgaagcgtgcaaactaattttgtgtattttgctgcttaatcttttgtgtcaggctatcttgtctaaaccagcgccaaggctgtaaagcgcctattcccataccgactaagcccactacaattgatgggcttaatgactcaccaagtaagggtacagctaaaatagcagcaataaacggtgccaaagttacaatacttcccgttttaaatgcgccaagacgctgaatagcagcaacataggttaatgtcgcaataataacgacaaacacgccatgaaaaatactttgtacagctaagtgcaaaggatctacatccataaagtgcttaggtaagaacaacaaataaatcggcaaataaataattgcagaccagattgcgacgcttgccatagaatgccaagcagagagcttccactgtttaagtagtacagtaaaaatcccccaccaaatcgcactgataaacagaagtaaatctccaattccaaaagcagaggtactacttttcaacatcaatgcgctcatgagggccaaggcagtaatcataattgccagactcacccatgtatgtttatcaaatggctgtctaaataaaatataagcagctatagcggtacagataggaatacagccatttaaaaatattgcagcatgtgcagctggtgcataaagaaaagctgtataaaccgtaaggcagtaaatgactccaccaatcaatgccaaaataaccgcatgcttactccataaaaaagcgagatcttttttataaattaagataggcatcaaaattaggaaggctatagcaaagcgtagtgcggcaatatcccaagcactgatgtgccattgtgcatttaagcgggcaaaaagcgtaaacccgccccaaatacacatggtcaccaatacaaaaaaataaccttgcgtacggggagacatatcaagactgcataaaaactaggaaggcagctaaattatacctcagaacgctgacgacaagcttcataaagtgccatacccgttgccacacttacatttaaactttgtaagttacccgacattggaatataggctttttggtcacactgtgcttgagtaattggacgtaaacctgtgtcttctgcacccattacaatcacaacagcacccgagaaatcacacttctgaataggtaatgcattttcatcaagcatcgtaccaatcacacggacatgagttgtctctttaagatgcgctaaagtacgagccaaattagtcacttgaataaatttaactttttcagccccacccgctgcgactttacgagcagttggagttaagcttgctgagcgatcgcgaggcacaatcactgcctgaacacccattgcagcggcagtacggatacatgcccctaagttatgtggatctgtcacctgatctaatgccagcaataaggcatctggagtttcagccaagagctggtctagatctttttcatttaaagtcgggtgcggacgtactgctgcaactacgccttggtgaaatggcaaacccgcaagcttttcgaggctatcacggcttgctttttgtacactaattccaaaaggctctgccaattgcaagatcttctgcaaacgctgatcgtcgcgccctttcaatgtaaacagggtcagcacgcgctccggctcaagttctaacaatgactccactgagtgaacgccataataatattccggttttgccatgcatgacctctaacaacgtttgagcaaaaaataaaaatcctgtaaagccaacttcacaggatttctttgggcatagtgtacccgatttaaacagtaatttcttagccttctaagtggcaaacataatcgagtacctcatcagtctcgattttgaaaacgctattgcctggtacataaaaagattgaccagcgcggaacaattcactttcattgctgtctgcaattttaacgcgacattcacctgaaataatttccatacgctcaggaacatgggtttcaaatgttaaaggctgttcagtcggcaaaataacacctaatgtttttttcgttccatcttcaaattgcacggtatggctgatacatgctccaccaaaataaacatttgattttttgatgaccgttacatgatcaaattgggttgaactcatgcacactctccagataatgccgcatttatataaattatgatgaatgtagtttaattgtgcctaaataactaatcaatcagttttcatacggatagacttgtaatttccactgctgtaactgaatttttttagcaaaagcgtggggtaaattcacttcaatatttcgactcttcgacacaattgcatcgtatctgcaaacttcatcgtgattttcatcgaataaaatccagtaaactttttctgccgttggatgattaaccgcagttgtaactattggtgaaccattatccatccctacatgaaaattgtcttggtcattttgcattgaagttagatcataaaccggaaaatcggcactattttcatcaaattgctggctatcatgtacaagcacactttgttttaaagtcggccaaatacaataacgcaggtaatgttgatctatgactcgattgtccggataccttccagtggcaacataatccctgatatgtgcttcaatattatgaaaaatacctgtacaaccgccccacatacccgccaaaattaattcagtatgagaatagctatctctcattaaatggaaccattgatcactcttaagccaagcatcaacagcggctttttcacgataagacacgatagagtcggcatcacgtactaaaaaccgtttaaccaccggatcatccataactaaaaagcgccaaaataaacctgataactgtttttgagtggggctgacatgtacgacttgtgcaccatttgcttgtaaccgctgttgtacaagttcgggaacgctctcatccacatagaatcgacacgtccattcaggatagatttcttgagctaacttagtatttaaaatggaagtttcacagtaccgcggatttgctccaaatagagaaaaagcaataatattttcttgtggatttgggctaaagggcacgggtttatgagtgggtatatttaaagtaggctcattctttgtaagttcttttttggttgaaatggctaaacgcccaaatttaatcttctcttcttttttatttaaatgatgacaaacttcggtcaatccatcgtataaatttgtattaacgttagaaccacttgctttaatggattgcatataatgttgatatgcatcgtcataacggcgtaaccgtagctcggtataagctaaatcagacaatgctccgggatgtccgggaaccagacttactgctttttttacatgttgatatgctttgacataatcaccttgtgcagcagcctgtttaaatgcattaaaatgctgatttaaaattttattcatttcagcaggattagtttttttatggcggttgatcatccctattggtgctttcggtaagcttaatgtttttttcattgtaaagatccgcaatcttgctgttctataatttcagttagaataatagatcacttgtagcaaattcaaaacttctctatctttaacccataatttggcgcgttggatgcgtttatgctcacacatttaactttaattaattttgcattagctgatcatttagctattgatatagaacaaggatttaatgttctaacaggtgagacaggtgcaggaaaatcattattactggatgcactatctgcctgcttaggggaacgtacagatacaaattatgtccgctatggttcggacaaagcggatgtaaccgcagtttttacttatcaggacaatagccctgaagcaaaatggttaaaagaacatgaactagatgatgattcaggggaaattcatttacgtcgggttatttttgcaactggccgtagcaaagcatgggtaaatggtcgtccaagtagtctctctgagcttaaagaattaggccgcttattggttcagttgtatagccagcacagccaacaacaactacttgaaccgccttatccaaagcattggctagaccgttatagtaatttttacgccgaagcaaatgatgttcgtgaagcatatagtacatggcagcgtaatatccgccagcatcaggctgcgctcgacgctcaggcaacccgtcttcaacgtattgcgaccttagagttacaaattgaagagcttgaggaagtcattcaaaccgattacaaagaaatcgagcaagagttcgatcgcctcagtcatcatgaacatatcatgcaagactgtagctatagtttaaatgcacttgatgaagctgaacaaaacattactcaagaaatgtcgtcgatcattcgccgtctagagtctcatgcggggcgtagtgagcagctttccgaaatttataattcgttattaaatgcgcaaagtgaaattgatgatgccacatcaaatttacgtcaatttattgaccgtcagagtttcgatcctgaacggatggaagaactgaactccaagctagaggttttccatcgacttgctcgtaaataccgtactcaaccagaaacacttaaagaagagtacgaaacttggcaaagtgagcttgagcaattacatcagttagaagaccctgaaactctggctgaacaagtagaaaagtcacatcaagaatttttagaaaaagcccagcatttggataatattcgtcgtgaagctgcttccccacttgcaaaacaattaactgaacaggttaaacctttagcgctgcctgaggcacattttgagtttaagtttgaaccattagaacaaccaaatgcagaaggtttaagttttattcaacttttatttactgccaataaaggcatacctcctcaaccattggcacgtgtagcatctggtggtgagctttctcgtattgcactcgttatgcaagtcatgaatgctgaaaagaccgaagcagaagttttggtatttgacgagattgatgtcggaattagtggtggtacagctgaagtggttggtcgtttattggccgacttggctcagcatgtccaacttctatgtattacccaccaagcacaggtggctgcacaatccgatcaacatttgttagtcaaaaaacaacaaactgatccggcaagtagtactattgtacaacttgatgaaaatcaaattatttccgagttagcgcgcatgtccggaggtgttgaaattaatgaaacaaccttgcagcatgctaaacaattacgtcaacttaaatttcaggcttcttcaacttaataaagaaaatgagagaaaaagattggcgaaatccgattaactcttgtatgttgataaaaagaacctatatagataaaaagggtcgagagaccctatagcgacattttttgagggagaaccgcttaggtgaccaaacaatatatgactcaccgttgtctgattgccccgccagaaatggcagatgacttttttgcaaatacagtaatttatcttgcccgtcatgacgaagaaggtgcccaaggtattattatcaatcgccctgccggtatccaaattaaagagctactcaatgatttagacattgatgcagacaatgtaaatccgcatgaggttttacaaggtggtcctttacgccctgaggcaggctttgttcttcatacaggccaaccaacatggcactcttctattgctgtgggtgagaatgtctgtatcaccaccagtaaagatattctcgatgcgattgcgcataacgaaggtgttggccgctaccaaatcgcccttggttatgcgagctggggtaaaaaccagctagaagatgaaatcgctcgtggtgactggcttatctgtgatgccgatatggatctgatttttaacttaccgtacgatgatcgttgggatgcagcctataaaaaaattggtgtagatcgtacatggctggcttctgaaatcgggcacgcctaatgaccgcaacgcaatcaaaatcaattatggcttttgactttggcactcaaaagatgggaatggcgattggtcagtctgcaattgaaagtgctaacccattaccactttttgtgatgaaagatggtattcccaactgggaccaacttttaaaaattgtgaaagagtggcagcctgatttgtttattgttggtcttccattgaatatggatgatagcgagtcagaactttcaacacgggcacgtaagtttgcacgtcgcctacgccatcaaaccaatattgaaacgtggatggtcgatgaacgactcaccactcgtgaggcaagagaagaacttggtttttatcaagaacaaggtcgtgccaagaagttgtcagccgatagttttgccgcagctttgctaattcagagctggtatcgcaatcctgttggtttaacgccataaaataaaaaagcatgtttcaaacatgcttttttattgagtttaaaaacttaagctttttatttttcaataatatgtactgtagcagtacggccagacacaaaagccaactcattttttggtgcttcgtctaatacaatttttacaggtacacgctgcgctaaacgaacccaactaaatgtcgggtttacatttgcaagcagtttcgaactacttgaacgctcacggtcttcaatacccgatgcaataccctgcacatggcctttaattttctgtctatcacccattaattgcacagttgcttcatcgccaatatgaatacggtctaattttgtttcttcaaaatatcccacaacataaagctgcttacgatctagcaatgctgcaaccgcttgtccaacttgaacataattacccggacgcaaatcaaagttagataatgttccatctgctggcgccacaacagccgcacggtgcatattgagttctgctaaatgtaaattacttgttgctgcttcaaccaatgcctgttgctgtttaatagtggcttcagcttgttgaatagcagcttggagttgctcatgttccgcgtgtgattgatcgcgagttgcaaagacctgatcttgttcttgcttagaaattgcaccatccattaagtttgaataacggtttgcgtttttctcggctaacttaatgttagtacttgacttaatcaagtttgctttagcttgggctagacctgcttgtgcttgagcataggccgcttttgcttttgccaaatcagattttgcttgctctacatctaaagctcggcgagagacatcaattttaaaaagcacctgacctttttttacagtctggttatcttgaaccaatacttccgttacaagtcctgctacatctgaagagacctgaataacgtcaccacgaactcgaccatcacgtgtccacggcgctgcattatagtagttccataaatgcacaatggtatagacagcaatcattaatgcgacaatcaaaatcactggacggatgacttttttcaactccaattgattcattttactcacctaactcaatctttaatctggcaatcatctttaagcacctaacccaacaaaaatttggtgtatcaccaaaagtagtaaaaggtaaaaacacaaattgaaaatactgggtaatgcaatccagccttgtgcaatccatttgttggttaagggacttaaccagcgaaaacatatatatgcaaaaatggcttggacgagcaaagcaggcacgtaaataccgtagacattaaactcacccatgcgctgtggctcctgtaagcgtacgatctgcattcatttggtttgatgaaacatgacacatgctataagcaatattatttagtgaaataaataatctttgacgcagagtcatatcttcaatatttgaagcaagttgtttaagttcaaataaggtttggtgaatgtgctgtaccaatacatcactttcacctttttcattttctttagctctaaacagctcatctaaatcttgttgcaaacggccaatgtgatgggccaattctgaagatgtcggaacttgatttgctagctcttgtagtcggcttaaatcaatgatcgcactggattcaaccaaagcctgttgaatagattttttaatctcttctgactgaaccattttagtatttaagacaccaacacggtctaacatcccccgtaagtgaactttaaattcaataccataaggaatgtatatggcttggcgcattgcacggtaatgtaaagccaaaatacggtttgcactggtatcgggtgacatagcacgcacaacatcaataacgactaatgacaccaatacgcccatgaccataccaaatgagctatctaaataagacactgcatccatactgtaagcattatgcaagttcagccccatcatggtattaatacctagcaccatgcccactggcatgagtgcctgattcgccatcatggaaaccgcaaacaaaaacattggtaataagacgagtccaagttcccaaaatgttgtgacataaggaaaaataccaaacgcgtaaataaaaactaaaaccgccgaagccacactgccccatataaaaatacgtaagacaggaaccgggttatctagtgctgttaagatacaggcagtgactgcaccgatctgtgccatcatgaacccagctttccagccagaaagaatccacacaccagtcacaataaatgtaatcagcactgcactaataccacctctgactgccacaccatgatctcggtgtaaacttggataggtcgtagtcattggggtaatgttatctggaatctctttattaccttgcttgatgcgttgccataaaacttttacagctaaaacattactaatgaaatgacgcacatccattttcatggcagccaataacacttgctgatgttcagaagccgaatcatttaagttcaagaaatcattttcaaactcgtcaggtaactgcagaatattttcatcagtcatctgatctttttgttccagaaaatgaatcacatgccctgaaagctgctttaatttatctgaatgactttcaataaaattgagttcttgcagttgtttaattcgttcagataaagcaaccaagttcgcgaccaccatcgacatttgatggagcatttcttgcaaaggtttggtcatcccatgcaactcacctttttcatagctcaagtgaactgccagagcatgaatatcggtcgtatcacgagtaatagcagctaaaagctgtgtattgttttgctgttgatctgcatttaacaaattagcaaacaggttttctgtatctttgagggtttttgttacacgctgtttgattgccgaaccaatatgcatgggcaaaatagtcgcagacacaaccgcactcgaaatcacaccaattgaaatctcaagtacacgagccaaagcaatatcaaaaatattgtactgatcaatataagtaatcgcgttatacacaatcattgcggttgaataacctgccaacataaatgcataactgcgaggagtacggtctaataaagacacataaagcgcaaagcccacccatagtgataacacaaccgtaaagatccacggcgtattaatcagatgcggagtaatggttaaggcaataatggccccgcctaccgttcccaataaacgataaacacacttagacgacaccatacccgaataaggattggcgataatcaggacggtaccgatcgaccacattggattaatcaggtctaattcgaacgatacaaataatgccaacataccggcaataaatgtctttattgcaaaaattagatcaagcttactcgggcggaaagccagtatttgctttaataacatgaactcatctcaaatatagatttgaactgatgagcatgctcatcagtgtccgtttgcttttaaaaaaagacaatacgactttgccatttgcctataagacaaatgagttaatgagagcatccttcaatacaatgatttttcctacatctctgcatgatgtaccgagatgatttcagtttgaccgctatttatacgaccaagcttaggaaagaagagacatcgagaaagccggcagaataaaccactttctcgattagatattttgttgcacaattttttcaaattaaagtgatttagtcaactaaaatatctttatttgataatttgatatgtttttagttaatcatatatgatgtgtgaatcaagagaacttttctgattctgagcgtaaaatatttaaatcaggcagttatcttggaattgagacaaagcttcaatttttctgttataagaactcaagtgtgacccgtttattaaggatacgaataagacatcatggcaatttcaagttttggcaaaattttaaccgtactggatttattttccgtttcacgaccagtgattaatgtcgatattatttgcgaagaacttggcttgtctaaaccgaccagctaccgttatctgaaagaactcgtatcagccgacttattaaaacgtattaatggtacttctggcgattacactttaggctcaaaaatagcagttcttgactatgtatctagaacaaccgacccattggtccaaatcagtacgccatttatgcgaaatattgtagagcgtactgaactttgctgtttactcacctatttaaatgatgactactgcattgatattcatcatgagatttttaaagatactgaattactttcatatggtcgaggctgcccacgcccaatttatgttggggcttcaccaaaaacgatggtttcacatttaagcaaacaacgcatgcatgactactatgaacgttttcaacatgagctgtctgaatcaggttttgctgtagacgaacctagctttattcagcgtatgcgtaaaataaaaaaacaaggcttctatttctcgcaaggtgagattgaccccaatgtttcagggcttgctgtacccgttcgtttttcgagtaaagaagttcctttggctttaacgttagtcgcatcaaagaaccgctttgattttttaaatattgaaaagttgattgaaattttgcaagaaaacgcggcattgattgagcagcgctttatggaactttcagaaaagggcgagatctaaaataatatttttgataatttaaagttttcttacactttgaagcattgaaaatatccaaatattctcatattatgattttagcacctattgatgattcttttcatcagcagctcatcaatagtaggctctccctcagaggaataagctcatgttgccatcatgggcttttttcttgcccaatttttagaaaaaacttatgaaaatttgaactgacgaaaagtcagattaatgcgtggttgtaaaatcttggttgaacgatttaaacggtgttgccaatattgttgagtctcaccacgcatcacaataagttgacccggttgtaaccacatctcaactttttctttagtttgaatatgcctaaaagagaatttccgcgttgctccaaaacttaaagaggcaattgtagtggttctggctaaagacacatccgaatcactatgccaagccattccttgtgttccatcttcatacaggtttgccaagcaagaattaaatttttctgaaaggatctgctctacttgctgttttagctgagcaagtgctttgtcccacggtaaagaatcacgaaagacaccagaatatttatatcgataatgctcatctccataccaagcaactttacgaggtgttataaagtgcttgccatatagcttcgcttcatcatgtcgccacgccagatattgatacaaataatgaaaatattgttcagcttcttcggcagttaaaatacatccataatcctgaacctcaccatcataaggcaataaatttgaacaaggttccggagaaaataaatctagtgtcatgcaatctccccttgctgcttagccatctcccaagctaacaatgccagtttacgccctttttgccaatggtactcaccgaccattcctgttgcgcgaatgacccgatgacatggaattaaatacgcaatcggattttggccaattgctgtagccactgctctgactgccttaggttttccaatttgctcagcaatatcttgataggttcgtaactgcccttcgggaatagtaagcagtgcctcccatacttgtagctgaaatggtgttcctgcaagattaagcggtaatttctgctgtaaatgttctgagaagtcttgtctaaaccactgtgcaatctgttgatgccaaatcggagagtgattttttaactgagctttcggaaaatactgtttaacgatttcttgtatgttctcactatgatcaacaaagcgaacagaacaaatccctttatcactacttactaccaataagtcaccaaatggactcgtttcaactgaataattcagttcaacgccatcaccttgctgcttgtattcaccaggggtcatcccttcaagctgaataaacaaatcatgtaaacgacccgtacccgacagtccagtatttaaagccgcatctaataagctacgttgctgcattaaataatattttgcttgctgcaagctcatatattgcacaaacttcttagggctaatgcctacccattcttggaactgccgctggatataactcggacttaaattcatatatgtagcgacatcttctaagcttggttgctggtctagatgttcatataaatattcaataattgtggcaatcgcagcaaattgccgagaagaaagcatttgcatctgtcacctccttagtactcaatcttactttaaagtagccaagaccccatgacgacccgattcttgcactttccaataaaaaagcctttctcaaggaaaggcttttgaacatctttttaactttatggctgctttaggtatggccatgcagcttttaaataaataaacattgaccataaagtcagaataacggcggtatataacaaagcataggccaatacttctaaaggctgccaattcaacaggaatacactaatcgcaatcatttgaaatgcagttttatatttaccgactgttgatacggctacactggtccgcgcgccaagttctgccatccactcacgtaaagcagacacagtaatttcccgtgaaataataacaattgcagcgaaagccattgcaattgtcggtttccactgcactaaaacaataagtgcagctgcaaccataagtttatctgcaaccgggtctaggaaacggccaaatgctgaagtctggtttaaagttcgtgctaaatagccatcaaaccagtcggttacggcagccagcacgaaaatagccgtcaagataatatgacgtgtcatacttcctacgtgctcaccaatacctattgcaggcggccaatatgcaatcaccaaaaatacaggaataagcgcaatacgcgccaaagttaggatatttgggatattcaggattcgccctgtggtcataaacaccgccaatttagtcttcacgcatcttttaacagacaaagacacatacttcaatattgtatctatctgtaacagccactttatacgaaatatgtgaatcgagaaagtagattacttaggtaaataccgtaacagtttgccgcaagattgcaattaaatgatcattttgatcccaaagatatgcatattctgtggagtacccctcagctgcatattcagtagttactttatatttaaaccagtcacacaactggtgccgaactggatgaacataagtaatatgccatgataaagaacttgcaggtgcaacttgcttaaacataggcaaaacacccggtggccaaatatccataagaacaatcaaatcagataatgtcatttgacgattcgcatgctgctctggtgagaaccgtgaccagccaccaaagtcggggtgtttacttcccgttaccggataattcccctcagcccaacagacttcaaaatgctgaaagcattcaggcatatgtttcgcaaaaggaatgacagataaattttcaggtggtacataagcagggacgactggctcttgctttacctcaatactcgatgcacgagaagccccaaaacttgcaaccaaaatcgtttgtaccgcatcatcttgccataaacgcgcttcaagcgtagtgactgactttccttctcttaaaacttcaatagtcaatcgggcagcgccttgttgtacggggcctacaaaaataacactacaacttaataatcttttatttgaatcttgaatataggagcatgctttttgcattaataccccagcaacaagaccaccaaaaacggtgcggccctgtaaccatcctgcaggtatatcaatccattcattttgttttacatcttcccatagttgcagtaatgacattcatatccctaaatcatgcgcatggttaagaaatatctttcatcattttgaccaatatgtgaatgatcattcagctattaatttacgagcacttttgtcactcatcttctcaacacatgactactcatgcaaaattttataaatcgttcttgccatcacttcacctaagcccggcacgactgtcagttctttttcagatgcttttaaaacaccttgaatcccaccaaaatgtgttaataaatctcgacggcgtttaggtcctaagcccggaattgcttctaaaactgaggtgctacggcgtttatcacgtttagcgcggtgtttagtaatggcaaaacggtgagcttcatcacgcacctgttgaatcaaatgtagcgccttactatcttcaggtaactggatttttgtgccatcggtaaaatgaagcgtttcaagccccggtttacggccttcacctttcgatacacctaccataaaagcttctaacccaagctcttgcattacttctatggccatatggagctggcctttaccaccatcaattaaaagcagatctggtaacattgcctttttatagcgacgcgttaaagcttggcgcattgctgcataatcgtcacccgcagtaatatcttgaatggcaaattggcgatagtcccgtttacgtgctccaccttggtcaaacactacgcatgatgcgatcggtgcttcgcccatggtatgactaatatcaaaacattcaatccgatcaattggacggccaactacctgctcaagctggtggaaacgctcattgagttctaagtggttactcaactgccctttaatcgcatgttgaacattcatttcggcaagttctaaccattcagcacgtgtttctcgtacactgctcttaatctggactttctttccaaactgctgtgctaaggcttcttccagctctttacggtcaggtaaggcagtattcacaatcagttcgcttggtacttcatcggcaacctgaaagtaaaagtttgccatgaagtcacttagcatttgaccaaggtcatcgcctaacatgtcagggaaatagcttttacctcccaacatacgaccgttacgtacatgcataatctgcacacatgtcacaccagcctgataggcaattgctaaaatatcggcctcacctttcactttgaaaacggcttgctgtgcttgtacttcgcgaagtaaagacaaccgatctcgataaaaaaccgctttttcaaattcaagatctgccgctgcctgttccattttcgcaatcagttcctggtttaattctttggtgtcaccttgtaagaaacgaatactgttattcacgtcttctttgtaatcttctggtgaaaccaagcctacacacggggccgaacaacgcttgatttgatattgcaaacacggacgtttacgctgtgagaaataactattttcacattggcgaacattaaaaagtttttgtaaaaccagtaaggtatctctggcactataagcacttggataaggcccaaagaatttaccgatttggtgcttacctttgccacgtccactggcaattcgcggataaggtttatctgccgatacaaagatatagacatatgacttatcgtcacgcagcataatgttataaggcggacgatgttgtttaattaagttttgttctaaaagcagcgcttcggtttctgaacgcgtaactagcgtttcaatatcataaattcgagcgactaaagcttgagttttcggatgctcaatggttttaacaaaataactcgacacccgattttttaaatttttagctttgccaacatataacaactccccctctttccctagcatcttataaacgcctggaagttgggtcagattagctaaaattttttcaatatggggacgagcgttttgattcactattggcatacatggcttaatattgaatacctaatgtgatgttttcacctttacttttcaagtgctttactgtgccagaaactaaatttgaaaagggataggaaactagcccgacaaagtgtgtcgtacttccttaagaatcgaggcgatagtaactatatttcacatctttttctttatagaccgcataggttttttgacggaaatcagagaaccagccattacccgtatagcccgcaatatgcccgtaagtatgaccactggtacgttcgataatataaatatccccttcttgaggacgattaaatgccggcttgattttcttataaccgttcttctcaagtgtatgcccccagtctgaagctgctaccggatgcttagacacatcggcacctgctgcttgtaaagcaatacgaatatttttggcgcatttctctttactatgtttggcagatatactttcaagcttactagagaacttatgcaaattaatattttggtcttcagttttatgatttttagttctagatcgtttagatttttcagtcgtcgaagctgcttgtcttaacatcacttttgtttttaaatcgccttgagaacggtcttcttttctctcttcgatatgatgaacatgtgcatgagctgcgtgatgagcatgagccattttaaaacctacttccgctaaccaagtcttcgaaaaaaccgcgccattgtagaatcaaaattatctgttggcttttaatagttgtaacaaattgccagcactgtgaaatgagtcacaaaatttaataaaggttaatttctatgaatactaaagaatttgtcaaagaacttataaatactatttcagacgaatatatcgatacttataaacagatttactcctctactttaatcgataataaaattaaagaagatccctactggtttgatgctctcactttttatcaatctttatctcaaaaagataaggaaaccttatttaaaatcattaaacagacgactattgatactacaagtataattctaggtattattgatggtccggtgagcttaaatcagatccctggtgactttacgctgacatatacagaaaatgagaagacagtaattttaaatggagatctacaggatgaattccttaccaaaataaaagaaagagacagatcacaatgatatataaggaattataacgagagaaatataattatgagattaaaacaaaagcttatttataaaaactcgaaaaaacgaaaaaatcaaattaatactcgaaccttgggcagaagaatataatattgaatcaaattctgaagtagagattattgttgaaggcgatatagaaaaaggatatttaatgattgaatcagagatagatcgtgttgtcatctatggttggcaaggaagtcttattcaagtcttcaaaaatgataaacttattgactaatgattttattaataatctattccttataacaggttattttagcttaaaacaaaaaacgccctttcgggcgctttcattaaaacacgtatggtcgaacaaaaatcaggaagaaaattccaagcatgaggaaccacttcaagaagtaatacaatttacggtttttagcttttaaagctttagctttaatacgaatttggtaaacataaccaaaggctttatttaagccccctgtttggtcaccagtttcattcggtgaacttgccgcagtcatcacattacgaccaaaccaatggttgaaacgttccatccattttactttcattggacgttcaacatcggcaaagaagatgatacggttttgatcagtcttattttcagcatagtgaatataagtttcgtcaaacacgacactttggccatcacgccaagagtatctttcaccatctacgtcaatgaaacaacggtcatcattcggagtaatcagacctaaatgataacggagtgagcccgcatatggatcacggtgtctgaccaaacggctgtcaggagcaagctctgtaaacattgccgctttaatcgttggtaatgttttgagtaaagccgttgtttttgggcaaagctcagcagcagaaggatggcttgattcataccacttgaggtaaaaacgtttccatcctgttttaaagaacgagttaaaacctaagtcgttataggtacttgatgctttaatcccaccttggtcatataaagctttcgcttcatctcgaatcatttcccaattttcatctaacacttttaaatctttaaagtgttgagtgtcgatatagggttgattcggtacctttgaaaagatgtacattaaaaagttaatcggtgcgagcaaggttgaatggtcaaaaaattgacgataaaacgagtgacgcactttgccgcgatgttggatatacaatgcagatatcacaaaaatcgctaatatgatccacttaatcatattgctactctttcaaagtttagggcaaccttaccttaattttctaaggtaatagcaaccggaagtttatttaattggcgcaaattttaacaaaattgacttataaaaagcgaatgtaaaaaattaaacattgtattttggaaaattaaggggtcttaatataaaaaagcgcttaatttgtggtggtgatcattcattagaaaattgtgactttgtagtcgatttttttaaacattacaccagaacaattgacctttttgacaagaagtgaataggataaaattctcattttttatataaaaaattaaagatttatactttttataaataaaaacttaaattaaaacaaaagcctttactcagcagctatctctatgattttctttatgcatttaattggtatgaattcaattaaaaataagatgacccttgcgtcacggcttgatacaacttgtcgggttctttttagatatagttatcgtaagattagcgaagcataaatgtgtaccggagctgtacacacgcttcataacatcaacttagaaatcctccaaaactaaggagatcaggcatgatccacgctggcaatgccattaccgtccaaatgcttgcggacggaattgcagaattccgctttgacttacaaggtgagtcggtcaataaattcaaccgtgcaacaattgaagatttcaaagctgctatcgcggctgtaaaagctaataacgatattaaaggcttagttgttacctcgggcaaatctacattcattgttggtgcagatattaccgaatttggtcaaaactttgcacaaggcgaaaaagcgattgttgactggcttatgcctgttcacgaaatcttcaatagctttgaagatttagaccttccaaaagttgctgctattaacggcatggctttgggtggtggttttgaaatgtgtttagtttgtgactatcgcgtgatgtcagaagctgcacaagtcggtttaccagaaatcaaactcggtatttaccctggtttcggtggtagtgttcgtttaagccgtctcattggtattgataatgcagttgaatggatggcaatggctactccaaagaaaccggctgctgcacttaaagatggcgctgtagatgctgtggttgctgcggacaaattacttgacgctgctactgatctggttaagcaagcgatttctggtcgtttaaactggaaagcaaaacgccaagaaaaacttgaagctgtaaaattgaacccacttgaacaaatgatggcgttcaacacagcaaaaggtgcggtacttgctaaagcaaatcctgctcaataccctgctccaaaattattacttgattcattacaagctggtgcaagccttgcacgtgatgaagcgttaaaagctgaggctgaaggctttgccaaagcagccgtaactcctcaagctgaagcattaattggtttattcattaatgaccaagttgttaaaaaagcatctaagcaacatgaaaagggtgctcatcctgtaaaccaagctgctgtacttggcgcgggtatcatgggtggtggtattgcttaccaagcggcaagcaaaggcactccaatcatcatgaaagatattggtaacccacaacttgcattaggtatgaaagaagcaaacaacttgttaaccaagcaagttgaacgcaagaaaatgaaacctgcgcaaatgggtgaaacacttgctcgcatccgtcctactttaagctacgaagagtttaaagaagtcgacatcgtgatcgaagcggtaactgaaaatccaaaagtaaaagaaatcgtacttgctgaaactgagaaaaatgttcgtgaaaacacgatcattgcttctaacacctctaccatttcaattacacgtttagcaaaagcattacaacgtcctgaaaacttcgttggtatgcacttcttcaacccagttcacatgatgccacttgttgaagttattcgtggtgagaaaacttctgaagaagcaattgcaactacggtcgttcttgctcaaaaaatgggtaaaacaccaatcgttgtaaatgactgcccaggattcttggttaaccgtgtattgttcccttacttcggagcatttgaccttcttgtaaaagacggcgcagatttccagcaaatcgacaatgtaatgtctaagttcggttggccaatgggtcctgcttatctgatcgatgttgtaggtatcgatacaggtgtacatggtgctgaagtgatggctgaaggtttccctgaccgtatgaagccagattacaaaggcgcgatcgaagcaatgtacgaagcgaagcgtcttggtcaaaagaatgatgtaggtttctacaaatacgaactcgacaagaaaggcaagaaagcaaaaactgttgatccaacagcgtatgaagtaattgctccattcgtaactggcgaaaaacgcgaatttgataaccaagaaattattgaccgtatgatgcttgctctttgcaatgaaactgttcgttgcttagaagacaacattgtagcgactgcgtctgaggcagacatggcaatgattatgggtattggtttccctccattccgtggtggtccatgccgttacatcgaccaaacaggtgttgctgaatacgttgcactttgcgacaaatatgcgcacttaggtaaggcttatgaagcgccacaaatgttgcgcgacatggctgctaacaacaaaaaattctacggttaaggagcgacgtgaatggctactttaaatccacgtgacgttgtgattgttgatggcgttcgttctgccatgggcaaatctaaaaacggtatgttccgtaatgtacgtgccgacagtttatctgctgaacttgtacgtgcgctcgttgcccgtaaccagtttgatgtaaatgaagttgaagacctgatttggggctgtgtaaaccagaccctagaacaaggtatgaacattggccgtaacatcggtttattggctggcttgcctaaaactgtggctggtcaaacagttaaccgtctttgtggttcttctatgcaggcaatccacactgcggctgcacaaattgcaacaaaccaaggtgatatcttcattattggtggtgtagagcacatgggccacgtaggtatgatgcacggcatcgaccttaaccctgaagcatctaaacactacgctaaagcatctaacatgatgggcttaactgctgaaatgttaggtcgcatgaacggcattacccgtgaagaacaagatgcattcggtgttgaatctcaccgtcgtgcttgggctgcaactcaagaaggccgtttcaaaaatgaaatcattggtgttgaaggccacgatgcaaatggctttaaaatcctttgcgacatcgacgaagtgattcgtccagatgcaaaccttgaagcgttcaaagcattaaaacctgtatttgaccctaaaggtggttcagtaacagcagcaacatcttctgctctttctgatggcgcttctgcaatgttgcttatgtctgctgaacgtgcacaagcattaggtttaaaaccacgtgccgtgatccgctctatggcggttgctggttgtgatgcagcaatcatgggttatggtccagttccagcaactcaaaaagcgcttaaacgtgctggcttatcaattgctgatatccagactgttgagttaaatgaagcatttgctgcacaaggcttgtctgttcttaaaggcttaggtctgtatgacaaacaagacatcgtgaacttaaatggtggtgcaatcgctcttggtcacccactaggttgttcaggtgctcgtatcaccactacgttgttaaacgtaatggaacaacaagatactcaaatcggtcttgcgaccatgtgtatcggccttggtcaaggtatcgcaacagtgatcgaacgtgtttaattaacaccaagataaaaaaatccccgctatgtgcggggattttcgctatgtgcggggatttttttatcgaccttttaaaccatcttgaatttgctgctgtaatttcaaaatatcatctaaatttactttcatcgtaccttcacgataagcatcgacattacttcggttaatttgtagaggctttaacatttcaaaaagaccattggttgggtcagaagattggattccacccgctacagctagaatatattctcgtaaaaatggagaaagctgggacaaatcgggctgtgccatgacaggttgatagtctactgtcgtcataccttcagggactaaagcattctgtatatcgttatgagttttatactcacgatgttgtagagcctgacgcacttttttatcttcttgaaatgggacaaagcctacttcttcacgtagctcagattcggccataacgcgaattgtaggtaaagtagccacttcttctgcttgaacagttggtaaacccataaaagcaaatacagcaatgaaggctgattgttttagaaagttcataacttgctcccaaaatcagtcaccctacgcgaactcaaaatgatgactaaataaaatgttctataaataggctacaacaaagtcatttttgattcagtaatgctcagataaacggtaaataacgttagatttttaaacttattaaaaagaaattcataaaagattttagaaattaatctgaatatggctaagtcatattatattgccagatttaaatattacgattttttgtttatagtcagctttttataaatctattgaattcgacagaaataatgaactttaaaatattaaatcagaatattcttatgagctgcttactagccagtttctttctcactggttgtgtgagtaatcgaattattggtgaaaacacgcgagagctatttacaaaatacgactcaggctatgaatggatcactttaacagaagatgatgtaattgcattcggtaaaccatcagtatctctcccaaatgaaccagaggacagtattgttatcgcagggaaaaaatatagttatgtcattagtaaaggcggtaacgatttcattcaattaattagtcaattaaatccacaatatattcaaataagtaatgagctagattttaatgctccagcttcgaatagtaaccatttttacggacatattagattttcttacaccccacctaatgggaaattgaacgagaaagaatcagctttattcaaacaatatggtgtaattccatgtgactatgaaaagacattagaactacataaatttgagttaaatcttagaggaactgtttatcctcctgtaaacaatcttaaaaaaataacccctttatccaagccatatcacgttagaatccaatatcttcatgataaaagcggaaaagtacccttatcaactaaggagaagctagcaagtttaccactgcttccgtttaccttaactttcgatattattgctttacctgcgaaagtcatgggtatcatttaccagccttaatagattaggaataaaaattacaaatttcagtaaagataaaaaatccccgctcaatgcggggatttttatcaattttctaacatttcttttaaagaatcgactaattgcggaaattccgtataaccttcccgacctaaaaagtgcccaccattaggaacggtaatataaggcgcatcaatatccttagccaattgaatcgttagttgtggtggaaccaaatcatcattatcagacaaataaaccagctttttctttatgtcacggaaatagttggtgtcgactttactctttgttatataaggactaagaggtgaagagtctgaaattggaccagagaatccagatactaaaatcattcctccaatattttgataatcatgtctttgtaaaaagtgtagcaaggtaattacccctaaactgtgggcaacaaaataagtattttcattaactgcaggaatctgctcatctaatactttctgccaagcatcgacgtccggatgctcagaatctggaaatggtattaaagtaacagttgtattttcatcttctatttgatgttttaagtccaaaaaccaatgatcgttaatagaagctgagtaaccgtgaagcacaaatatttgacgcatgttcttctcctgtaattcaagggttttggcatttgtaacaaatgacattaatccaaatatcaccaataaaatgagttttctaatcattgaacaagtaccattttgaaatataaaaacatgctaaactatgacaccactgttaaggtcaacccatattttatgaacctagctaaagtttccgagctcacaaaagtaagcccacgtatgctgcggtattatgaaaatttagggcttatacagcctcatcgagcgagtaataattatcgaagttatacgcaaaaagatattgaaaatattaagaaaattaaaatattaaatgacgcaggtatgaacctgaaagacattcatgttttattgccatgttttgatttagatgaacgggtatttacgctgtgtccagtggttcaagaaaaactgcaaacagaacttaagcatgtgtccgatcagttaaacaaactgcaaacttctcaaagtttattacaatctttcttggcaaaaggaaaagctgagagcaccaatatttaaaagtgatgcccctcctatagctattcttttaactctccttccaaggcagctacattctttttcttaattttttcaatttttgcattaagttttaaaacgtcttgatacagtgcattaaactttttgacctgagcattttcatggaaaagtatcatctgatctttcttttgccatggataagtttttaaaagcttaaacatttcttctgctttatctaaaatttgtagctcaatcataaaaattgcatggtcctgatcggctttttgctgagctcctaattttatttcgaggatttgtctcatctctttatcaacagacagttcctgaatttttgccaagaaggttttatgaattttttcatattcggattgatacttatctgaagctctgcgaacatcggctagcattttttcggtttcagcatatttttgttttttatcatgatctaaacggtcaacatttaaaaacgtatcccatttcgcagcttttaattctcttaaatattcattacgtgcatttacattttggacccaataactcaaaagaaactctgagacttgtttgtagtgtcctgccagccgtttatcgtgaatatcaagttgtacaggtttagtccagtcttgggcctgatcataaagctgattcattttttcagtcattaccacatcaaacatttgactgctatctttggcttgctgctgttttatatgttgataggtaaaaaaaacaatactcgtaataacaaccagacttgcaattgcaatcaaaactcggcgcataaacacctcctatttccattcttatagttttgctctttatagttataaaatagagcttatagttctttatatgccatttatttcacaatacgcaacactctattctccattcaatgctttaaatccgtgtacatcatccctattatgatgagtaaattatatttatgagattctcccatgcgtgttgatgtctggtctgatgtagtatgccctttctgctatatcggcaaaaaacgccttgaacatgtcgctgccgaggcaggtatcgagcttgatattcactggcatagtttcgaactagatcctgatgctcccgcaaaacatgacacttcaaatactgagcgtttggctaaaaaatatggccgtacctatgaagagatggaagaaatggaacgcaacattgcggccatggctgcttctgaaggtattgacttccaatggcaaaaagccaattcaggcaatagctttaatgcacaccgtattatccaccttgcacaaagtaaaggtttaggaaacgaagcaaaagaagcttttttccatgcttatatgactgaaggtctagctattggcgaacgcgaagttgtagaagaaattgcttctcgtattggccttgataatgccgaagttgaatatgtactcgatacaaatgagttggctgactttgttcgtcatgatgaaaaaattgcacatgagcagctcaatgtaactggcgtacctttttttgtatttgaccaaagaatcgcacttgcaggagcacaacctcgtgaagtgtttttgcaagtactagaacaggcacagctcaaggcaaatgctgaaaatatcgagcaagatgacgcagctgtttgcaatgatgaaacatgcgatattccacaaaataaataggtttaacgataaagtgtgaacaagtcgtatgttttatcaccattttagcaatagagcgttctaaaaaaagaactattcaattgtttaaaatcggtttatgattgcgacttagaatattcgcgctgtaatgttctgttttttatgtgtttaatgatcggaatttgaagtttccttgatcaaaaactccccctagtttgggggattttttttgcttaaaaattatcgctaatagcttaaactttttaattaatttcaaatatgtaagaaaagttaaatttacttaagttttgtgtcgtcctcttgattttattagaaaaatctacaaaagtgacaataacaacaaaacataaagatagatatgaaaacatttcacatcattacatatcggcagctttttgcccttttgaccttaggatttggttcagtatgtatggctcatgcagaagtaaattcttcctcaacccaacaagtaaacggtttgtcatctggagcacaaactgaagaaaataaagatgaaaatcttttagaccaaattccaagatggattgatgcaaccccaacgattttccccgagcagtccaacgaaccgattgttccaccaaccgagcaaacagaagatcagacttggtttgaccgtaaacaaaagaaaatccgtaattgggccgatcgtacatctggaaaaattgataattggtttggtgaagttgacccacaaaaacccgcgtcagccaccattcgagtcatgatcgataactattggaatgaatatgataattatgaaatcaagcccagaattcgcggtaagattaaattacctactctagagaagcgtttaagtgtggtatttggtgatgactctttagatgacgaatttaataatagcccagccaatatcaatcaaaacccaaatcaagatccaaataaaaagttagatggtaaacgaactcgagatgacaacagctcaatcgcattacgttggtcaaatttctcgaaaaagctaccttttgaaacagacgctgacttaggtatccgttctggcgatgatatttatgtccgtttaaaagcatcgagagactggcaactccgtaatgattttaaattttatgcagaacaaatttatcgttatggcatagatagtgaaaactacttacgaactaatcttgaacttacccatgctcgtccaaatcagccgatcttatcaaaccagttcagcttaacttatgccgatgatcaagatgacgatttgacatgggaaaaccgtcttttccgagaacatagcttctttgcaaataaccgttttaactatggcatttatacaggtggctactacaatgacaacgatttacgtttaaacagttggggaccatttgtatcatggcgtcagcctgttttacgtgaatggttctttgtacaaggcgacctcaattactttaatgaccatcgtgaagatcgcaaccattatgtgagcacattcttacgattagaagcccttttctaagcttaaagatcaccttggattccccatccaaggtgatgaataataaaatacttttaaataaaaatttaagcttttcttcttacaataacgagctaatttttgattcctgatcttcagaaaaatgaatcaattctcttctttttcatttgaatatagatctactgccttactttgcatttatagcttaggtatgctggttttaattcctcatatacagctttttcctacttctttgaaacactcacgctctacaaggcgaaccctgtattcgtctgtggttactctcaaaacaaaaagtcagtctgtatcttttttacattcaccatgcgaagtagaaccaagtcatagttcagataccgcacttattcaggacctgatggctgtatttggaaatgatacgttgtggagtcgcgcagcccaacataaacatccttataaaacctttggcaagatcaagaagaaagcttcaactcctcatgtttcagaaaataatccgctcacagcaagttggaataccatttcaacctggatgccatttgaaaatgatcttgatctaggctcaaactcggaaagtgatgtttatgtacaatttcttgccaagaaaaaatggaatttacgacataacattagtctagatactgaacaaattttccgatatggttcgactagccggaattacactgaaacgacgctgaacttaacgcagaaaatgcaagataacacattattttccaatacatttaatgtaaataagagtggaaaagaagattacaactgggggaattggactttccaacaatttgaatttgtaaaagataatcgtctgacttacggtatttatagcggtggtgtatatgccaataatgatatccgcctaaatagttggggaccttatatttcatggcgtcaaccgatatggagagattggatttttatgcaaaatgatcttaatttctttaactatcttgatgatgaccccaagcatcagctcagtgtccaaatgaatctagaagctaatttttagacaaaaatcatcaaattgtggataactctttctttatccacaaaaaagcccctgataattcagaggctttttctattgcaaaattattttagcaacaagctattaatgcgcttcacataagctgccggatcttccggtaatccaccttctgcaatcaccgcctgatcaaaaatcacattcgccaaatcatcaaattgttctgaaccttcaagttttttcactaaaggatgctcagggttaatttctaaaattggcttgatttcaggtacggcttgccccgcttgtttgagcatacgaataagttgaggagacaattccccttcactagtcactaaacatgccggagaatctaccaaacgagtcgttacacggacttctttggttttagccttcaatgagtcacttaatttctcaacaacaggtttaaactgttcagccgcttgctcaagtgcctttttctcttcagcatcttgcaagtcacctaaatcaactgcacctttagatacattcttcaatggtgtaccgtcaaactcgtgaacaaagttcattgcccactcgtcaacacgctctgccattaataatacttcaatgccttttttcttaaacaactccaactgtggagagttcttagcagcagctaaactttcagcagtcacataatagatagctttttggccttctttcatgcgtgccttatagtccgcgaaagaagttgttacttcatcatttgtggaagttgcataacgtaataattttaaaatacgttcgcggttaccgaagtcctcacccaaaccttctttaagaactgagccaaactcagtgtagaacgttttaaatttttcttggtctttctcatcttcagatttagctaagccatcaagcaaagtgagtacacggcgtgcgttaccttcacggattgtcttaacatcacggctttcttgcaacaactcacggctgacattaagcggtaaatcagcgctgtccacgacaccttgtacaaagcgtaaatagtttggaattagattgtccgcatcatccataataaatacgcgttttacatacagcttaattcctgcttttgcttcacgtgtaaaaatgtcatgaggtgctttacttggaatataaagtaactgggtatattccgtactaccttctacacggttatgtgcccatgcaagcggagcttcaaaatcgtgagttaagtttttatagaactcaacatattgctcttcagtcacttcactcttgttacgtgtccatagtgcacttgccgagttaattgcttcccactcatctgttttgaccatttggccgcctttaggctcctcaccttcagcaacctcttcttcttgccaaacttctttttgcatttcaattggcaagctaatgtggtcagaatatttattaacgatttgcttaactttataagactctaaataatcaagcgcatcatcacgtaagtgaagaataatgtcagtaccgcgtgaagctttatcaatttgctgaacttcaaactcacctgtgccaccactaatccaacgcaccccttcagaagcatctagacctgcgcgacgtgattcaactgtaattttatcagcaacaataaaacctgagtagaaaccaacaccaaactgaccaattaactgagcatccgctttctggtcacccgtcaattttgacatgaaatctttagtacctgattttgcaatggtacccaagttatcaatggcttcttgttggcttaaaccaataccgttatcagaaatcgttaaagttttatcttctttatttaagctgattcgtacatgtaaattaggatcattttcataatattcaggatgattaattccttcgaaacgcaatttatcacaagcatctgatgcattagagataagttcacgtaagaaaatttcagggtttgaatagagagaatgcgtcactaaatgtaaaagctgtgctacttccgcttggaaactataattttgtgatgcttgttcactcataaatcactccttaaattttgaagtctgtttgttctagaatgctttatgaatggagtacttctagaatttttcaatcctgaatattaaaaaatttttctctaattaaaatggtccatggcttaagaccctatcttgtaaaatagtgtctagttgtttttgtctttgttgatatgccttagaaatacaactcacattagctgcacaagcatttctttttttcagccattgctgctgtgtatctttttgattatcacgtccacccattggtagtgcatgtaaaacaatttgatatgtcgttgccattttgacatcggcatcatttaaagatcggttcttacaaatactgagttcagtctttgtttttgcagcattgcaagagaaactagcagcttgcaaactatgcgtaaaagctaaaccactaaaaagtgctagccccatggcaaattttctattcatcatgttattcctttaaaaatgtataaaaaatagtttagaaataaagagcggtaaaatatgtataaaactgtctattttatgcgttttttagtgagaaccatgaaataaaaaacctcacataaaaagctatgtgaggtgcctgaatctaggtttattattatattctttctatttattattatgcttagaatttatagctataacctaaagtgtaaacaaacgggttaatatctaagtcaaatttagcaccatttgttaaagtaacttctggactaatatctgcataacgaacatctacaaatactccccaatttttagcatcagcaggttggaaattaaaaccaacttggccagctacaccaaaatcttcttttactttgtcagctacgccttgttcatcccaaggaataaatgctgttgccccgataccaatatacggtgtaaaacgagtcgagtttttaaaatgatatttcgcggtaattgttggtggcaattgtttaatacgcgctactttctgaccatctaataaaacatcatgattaaccggcgttgctaataataattctgccgaaaatggagtttgaccaaaaaagtattctactgatggagtaaatgcatattcatggtctgcctttaccacacctaaagcagttgttgtgtcttccgatggagcaataacgctacccccaaattttacttgccaattaccagcaaaagtaaatgaagacacccccattaatgcaacaactaatactttcttgaacactttaatatctccaaccttatttatatttataataaacatttattttaaattgatgcaacacccattataaaattatttttatatttatttttaaataactgttttaaataaaattatatattaaccaactattttaattggtttttattccaacctaattaatcagaattgttttatataaccaacctttttaataaactttaaatcccgagtattttaatatagtttattccaaatacatgttttgtttataccataaaaaaacctccttaattattatctctagataaaaactaaggaggtctttatttaatattttataaaaattataaaaccatggctgcaatccaaccaaaaattaatagcggaatattaaagtgaataaatgttggtatcacagtatcccaaatatggtcatgttgcccatctacacctaaacctgctgttggtcctaaggtagaatcagaagccggagatccagcatcacctaaagcagcagctgtcccgataagtgcaattgtcgctaacggtgagaaaccgaactggacacataaaggtacataaataacagctaatacaggaacacttgagaaagatgaacctataccaatcgtgacaaataggccaatacaaagcattaaaaatgcagcaagcgcacggttatcaccaatgatttctaccacgcctttaaccaattggttaatatctccggtatgagtcataaccgaagcaaaaccggcagcagagatcataataaagccgactagagccatcattctcatgccttgtacaaagacatcatctgcatcttgccatttaaaaatgcctgccgtagaaagcactgcaaagcccactaaaccacccaagatcattgagccggaataaagctgcgcaactaaagtgagtccaatagccagtaaagccataaaaattgtttttttagcaataacagggccttgctctgcctcatgtttaagttcttctgcgtctgcttttaagtctgctgtttcatcttgtgcagttgcacgaagaggtttatctaaatcaattgtagttacagggcttatcgaacggtcagcataaattcgtggcttacggtaactgataaataccgcaaccaaggtgcctagaaccattcccaaaactggaattgccataccaataggcatcatgccacgttctacatgtaaaccataagcagcaccaattttgttgatatttcccatcaaaatctgttcaaggaaaatcgcaccaaagccaacaggtaagaaaatatatgtcccaaccaagcctaaagtaagaacacaagctgcggcgcggcggtctaattttaaatggttcattacccgtaatagagggggaaccaatacgggaataaaggcaatatgaactgggataaggttctgagagaaaatagctgcgatcagtaaaatacctaatagtaaatatttcactttagtttctcggcttttccccgcttccattcccaataaaccaatcagtttatgggcaagtaaatcgggtaatccagattttgaaagtgccagagcaaatgcccctaacactgcataggcaagtgcaacctcagcaccatcaccaagaccagcgttaaaggcttcaacagtttgagaaaggcttaaacccgctacgaggccgcccacaatggcagaaaccactaaagtcagtacgacagaaacgcgcgccagtgataataagaacatcactgcaatcgcaataacgacagcattcatgaataagttcagagcaaaacaaaaggcgatattctaccagattcacctctatgaagccgaaaatatcgccgaattaccagttttgtatattaaacagtcacttattagctctgcgagttaataaactggcgaatatgagctgccactttttcagcctgactcaaaatcgcccaatgatttgcttcaagctcaacatattcgaagttttcaacccattttggcatcgcttctgtaatatattctgggctgacaaaagtgtcatactttaaaataattgctttaactggacattgcgcataacgctgacgaggacgagttaaacgtggaataaaattcgcacgatataagttaataccgtatttcccatctgaggaaatattactatttaaaggcaaattatcttttcgctctaagtcatttaagatcttaccccacttctctggactaaacagcgaccatacagttggagcaattagcggtaaatggaatgctccgatataccatgattttgtgagtatttttaggatctgtgcaggtgatgttttaaacttctctcttaagaaaagtgccgcatgatccaaacatggaccggaaattgttgtataagagagtaaacggcctttaaatttaggttctgttgcagattcccaagactgaattgaaccccaatcatgcgcagccatatggaactgtcgatttgggattacctcatctacgacttcctgcaaatctaaagataaacgttctaaacggtaatctcgtatccgtttaggaatagaggataagcctgccccacggacatcataagtcacaatataaaaatcattgattaaatgctcaatgaccgattcccatacttcctgattatctggataaccatgcactaacactaatggagtatttttctcatcaccccaagctttggcacacaaggtttgttgatcacttgtcgttacggcataaatctttggctgcataatcatttcctattttgtttttcaatcgatcatgtcgttaatcggataaagcattgccatcaatataaaaaagatgatacttatctagtatgaccagtgttgcaataaaaaaaattgactattatggctattttaaaaaaacttcagaacattccttcaatttccaaattcttatttaaccattacccaccttaccgtggagctggaattcatattgaagtcatgaatttagagctctgtcatgttcgggtaaaaatgccacttacttggaaaaatcaaaatctggtaggcactcactttggcggaagcctttattcaatggttgacccgttttatatgttgattcttatgcatcatctcggatcaaaatatattgtttgggataaagcagctgaaattaattttttatcacctggccgaagtaccgtttatgctgacattcgagttgatttagcagaaatcgaacaaattcgtgaacttgccgaaaactatgctcctgttcttagaacatatcatttaaatattttcgatgaatcaggtgtgagaattgctgaagtccaaaagacactttatatccgacgtaaaaaagcaaagccttctactaataaaataagcgcctgaaggcgcttatttttcatttcacttatttttatttcttttcttcaatcgcagcaccagcaccgccgccgattgcgccaccaattgcagcacctgtatcaccacctatgattgctttaccaacgaccgaaccaatacctgcaccaatcgcactcttggttgtagtttgtttactgccaccttgagtattagaacccacacctgcacctaccgcagcacctaagcctgcaccgataccaccaccaacatggttaccaagaccgccacccaatgcaccacccgctgctgctgcaccaatacgctggtcagacggactcatattttgacagccggtgaacataactgtagataatatgacagtagatattaaaccaatttttttattcatgaccgtactcactcctttgggctttaatcaaagcatagtcttcttttatggggaatttgatcagtttgtgttattgcactgtcgtaattaatagatattttgtaaagccaatttatgcacagtgatgagttaaattttcatcttttaaaaacagataaaaaagaagctcttaatgaaataagagcttcttttttaatatagttagaggtagttttagtacttaccttttttctcttcataggctgcaccagcactaccaccgagtgctccacctgcagcagcaccagcgtcaccaccaatcactgcaccccctaagattgccccaacacctgcaccaatcgcactattacgtactgttttactgctagagcctttagcattagcggcaacaccagcaccaagcgctgctcctaaacctgcaccaatattaccgcctatatgtttacctacggcaccacctgcaccaccaccgatagctgccgaaccaatacgtttgctttctgggctagcattttggcaacctacaaatagagtagttgacattaaaccaacacctgcaatcatcatcatttttttcattaaaagctactcctctactcagttgcgcctagaatagtatgctttcatggagggttttcccccattaagtaataaattaagagtgctttaatagactttttgtaaaaatggcttattttttccacaaaaaaggcgccctaaggcgcctttttaatgcaagtttaagcttagaattgttctgagtttaaagcttggctaaatgcttggtctacttcgctgaagtcattgtgaagagcatgttctgctgcttccgcttcttgacgacgacgctctaagtggtatgcaagaccagtaccagctggaatcaagcgacccactacaacgttttctttcaagccacgtaaatcatcttctttacctgttacagccgcttcagttaacacacgagttgtttcctggaacgatgcagcagagatgaatgagtcagtagaaagcgatgctttcgtaatacccatcaattgacgttcaaacttcgcagggaacttgttctgcgccaagacagcttggttctcttgaacaacacggatgtaatccacttgttcacctttgatgaagcttgtatcaccaccatcgatgatatcaactttacgcaacatttgacgtacgataacttcaatgtgcttatcgttgatttttacaccttggagacggtaaacgtcttgaacttcgttcacgatgtagttagttaaagcaacttcacctttcaagcgtaagatgtcatgtggattttgtggaccatcagaaatggtttcaccacggttcacatgttcaccttcaaacacgttgatttgacgccattttggaatcaactcttcgtaaatttcagaaccgtcatctggagtaatcactaaacggttcttacctttggtctctttaccgaagcttacgataccagacacttctgccaagatcgcatgttctttcggcttacgtgcttcgaacaagtcagcaacacgcggaagaccaccggtaatatcacgagtacgtgaagattcttgtggtacacgaccgataacgtcacccacaccaattgtttcgccgtcgcgaacagtcacaattgtgttttgtggtaagaagtagaactgttcaccgccatcagttgtatctaatacgattgctggacgtaaatctttaccagaagcaggacgtgctgttacaggcaagatttcaacagttgtcataccagttgcatcatcagttttagatgttgcagttacaccatcagcaatttggctgaaacgtgctttaccagcaacttctgttaccaatggatgcgtatgcggatcccatgtcgcaacgataccaccagcctcaacaagctcaccatctttcaacaagatgctcgcaccgtaaggaagtttgtagcgttcacgctcacggcctaactcatcggcaataccaatttcacctgaacgtgaaactgaaaccaagtggcctttcgcatgttgtacagtttttacgttatggaaacgtacagtacctttgttacgtacttgaacactgtttgcagcagaagttcggcttgcagcaccacccacgtggaacgtacgcattgttaactgtgtacctggttcaccgattgactgtgcagccattacacctactgactcacctgggtttaccaagtgaccacgagcaaggtcacgaccataacatttcgcacatacaccgaatgttgattcacatgcgattacagaacgtactttaacttcatcgacaccagcctcttcaagctgagccgcgattttctcgtcaattaacgtaccacgaggtaatacaacttcatcatcagatgcacgacgtacatcttcagcagttacacgacctaatacgcggtcacgtaatggctcgatgacatcaccaccttgaatgaatggagtcatcactagaccaccacttgtaccacaatctggctcagtaattactaagtcttgtgctacgtctacaagacgacgagtcaagtaaccagagttcgcagttttcaatgcagtatcggccaaacctttacgcgcaccgtgtgttgaaatgaagtactggagtactgtcaaaccttcacggaagttcgctttaattggagtctcaataatcgagccatccggttttgccatcaaaccacgcatacctgcaagctgacgaatctgagccgcactaccacgggcaccagagtcagacatcatatagatactgttgaatgatttttgcttctcgtcttcaccttgtttgtttttcacaagtgtataagacaagttatccatcattgctttagcaacttggtcgtttgtacgcgcccaaatatcgacaactttgttataacgttcaccagcagttacgaaaccttgttcgaactgttgttcgatttcacgaacttctgtttccgctttgtcaataattgtgtgtttcgtaggtggaattaacatgtcttccatacctacagatacacctgaacgagtcgcttgacggaagcccaagtacattaattggtcagcgaagataactgtatctttcaaaccaagtttacggtagcaagagttgattaacttagagatgttctttttagtcatctcaaggttgatcatgtcaaagcttaagccttctggaacaacttcccaaagtaagcaacgacctggtgttgtatcaacaataatagtttgctgttcacgctcaccattttcattgataaccgtttgatgcacacgtactttaacacgagcatggatcgcaacttgaccagttgcaagtgcacggtttacttcgtgagtatccgcaaacaccatgccttcacctttcgcgtttactgcatcacgagtgatgtagtaaagacccaagacaacgtcctgagaaggaacgatgattggctcaccgtttgctggtgacaagatgttgtttgttgacatcatcaatgcacgagcttctaactgtgcttcaagtgtcaatggaacgtgtaccgccatttggtcaccgtcgaagtcggcgttgaacgcagcacagacgagtgggtgaagacggattgccttaccttcaataagaataggttcaaatgcttgaagacctaaacggtgaagtgttggcgcacggttcaacattactggatgttgacgaattacagatgcaagaacgtcccaaacttccggggtctcacgctcaaccattttcttcgcagctttaatggttgttgcctgacctgaagcttgtaatttcgcgaaaatgaatggcttgaataattcaagtgccattttcttcggaagaccacattggtgaagacgtaaagtaggacctacagtaattaccgaacgaccagagtagtcaacacgcttacctaacaagttctgacggaaacgaccttgtttacctttgatcatatctgccaaagattttaatgggcgtttgttagaaccagtaattgcacgaccacgacgaccgttatcaagcaacgcatctacagactcttgtaacatacgtttttcgttacgtacgatgatgtccggcgctgcaaggtcaagaagacgcttcaaacggttgttacggttaattacacgacgatataagtcgttcaagtcagaagtcgcgaaacgaccaccttcaagtggaactaatggacgtaaatctggtggaagtaccggaagtacattcattaccatccattctggcttgttgtttgagtctttgaatgcttccatcaatttcaagcgcttagacgcttttttcaacttcgtttcagaagttgtttgaggaatttcttcacgtaaacgtgaaatttcagcttcaaggtcgatgtctttcaacaagtcttgaactgcttctgcacccatttttgcaacaaattcgtcgccgtgctcttctagagcagtaaagtattcttcatcattaagaagttgatacttttcaaatggtgtcataccaggatcagtaacaacgtatgattcgaaatacaatacacgttcgatatcacgaagtgtcatatcaagtaataaaccgatacgggatggtaacgattttaagaaccagatatgtgcaactggagaagcaagctcaatgtgacccatacgttcacgacgaacttttgctgtagttacttcaacgccacatttttcacaaatgacgcctttgtatttcatacgcttgtatttaccacacaagcattcgtaatcttttactggaccaaagattttggcacagaacaaaccatcacgttctggtttgaacgtacgatagttgattgtctcaggttttttaacttcaccatgagaccatgacttaatcatttctggtgacgcaagaccaatacggatacggtcgaactcaactggtgcatgaccatctgagtccgttttcttacgcatgatatcgagcaagtctttcaatttttttctccgtgtgtcgggaagcctcgcttacccgactgggtcacaaatattgtttttacctaaaaaatcgtgagtcttacgacttagtcaccattttttagttcaatgttgatacctaaagaacggatctctttggtcaatacgttgaacgattcaggcatacccggatccatataatggttaccatctacaatattcttatagatgcgagtacggccttcaacgtcatccgacttcactgtaagcatttcttggagtgtatatgctgcaccgtatgcttcaagtgcccatacttccatctcaccgaaacgctgaccaccgaattgtgctttaccaccaagcggttgttgtgtaacaagtgagtaagaaccagttgaacgcgcatgcatcttgtcatcaaccaagtggttcaatttaagcatgtacatgtaaccaacagttactggacggtcaaactgttcacctgtacgtccgtcaaacaatactgtttgaccagtacgtgaaatgtcagccaattcaagtaagtctttaatttgactttcttcagcaccatcaaatacaggagtagctaaaggcacacccgcacgcaagttacctgcaagcgctagaatttcttcatcagtcaagctatcaagatcttcttgctcaccgccgactttgttataaatcttgtctaagaattcgcgcagttctaaaactgtacgttgttctttcaacattttttcgattttgtcaccaagccctttagccgccatacccaagtgagtctctagaatctgacccacgttcatacgagatggtacacccagcgggttcaatacgatatctaccggcacaccgttagcatcatgtggcatgtcttcaacaggtaagatgttagatacaacacctttgttaccgtgacgaccagccatcttatcaccaggctgaatacgacgtttaacagctaagtaaactttaacaactttcaatacaccagttgttaattcatcacctgttgcaagcttacgtttcttctcagcgaatttctcatcgatttctgcgctcttctctttcaagaacacttgaatttgagttaaacgctcagcgattgcttcatctgctggttgaatttcaagtaagtcaacaagctctaaaccagataataaatcttcagaaagtttatcaccacgtttagttgaaccaccgccattagactcttggcctttaagcaaacgaattacacgctcacgagccgcttcttcgaagatcttgtattcttctttcaagtctttacgataagaatcaagctgtgctttttcaattgctaaagcacggtcatctttctctaagccatcacgagtgaagacttgaacgtcaataactgtacctttagtaccagatggaacacgtaaagatgagtctttaacgtcagctgctttctcaccaaaaattgcacgaagcagtttttcttcaggagttaactgagtttcacctttaggcgttactttaccaactaagatgtcaccagcagtaacttcagcaccgatataaacgatacctgattcatcaagtttagaaagcgcagcttcacctacgttaggaatatcggcagtaatttcttctgcacctaacttagtatcacgtgctacacatgacaattcttgaatgtgaatagaggttaaacggtcttcttgaagtacacgctcagataacaagatcgagtcttcgtagttgtaaccattccatgtcatgaacgctacacgcatgttttgaccaagcgcaagttcacccatgtctgttgacggaccgtctgccaagatgtcaccacgagcaactttgtcgcccaagttcacgataacattttggttaatacaagtattttggtttgaacgcgtatatttgatgaggttatagatatctacacctgcctcacctgcaaccatttcatcttcgtttacacgaataacgatacgagaagcatctacatattcaattacaccgccacggtttgcgattacacacacaccagagtcacgtgcaacgttcgcttccatacctgtacctacaagcggtttatccgcacgtaaagtaggaactgcctgacgttgcatgtttgaacccatgagcgcacggtttgcgtcatcgtgttcaaggaatggaataagtgatgcagcaacagatactacctgctgtgcagaaacgtccatatgcgttactttttcaggcggcatacgtacgaattcaccttgatgacgaacagaaacgaattcttctgttaagttgccatctttatctacagcagagtcggcctgtgcaataacagtacctacttcttcaattgcagataaatattcaacatcatcagttacacgaccatctacaactttgcggtatggtgtttccaagaaaccgaagtcattcgcttttgcgtatacagaaagcgagttgatcaaaccaatgtttggaccttcaggagtttcaattggacaaacacgaccatagtgagtttggtgtacgtcacgtacttcgaagcctgcacgttcacgtgttaaaccaccaggaccaagcgcagatacacgacgtttatgtgtaatctcagataatgggttgttttggtccataaactgagataactggcttgaaccaaagaattctttgattgcagcagcaactggttttgcattaatcaaatcttgtggagacaagttatctgtttctgcttggcttaaacgctctttaacagcacgctcaacacgaactaaacctacacggaattggttctctgtcatttcaccaacagaacgtacacgacggttacctaagtggtcgatatcgtcgacttcacctttaccgttacggatttcaaccaatgtacgtaatacatcgataatatcttcgtgcgataaaataccttcaacttcgcgtgacttctgatcagtaccaacttcgtaaggacgacctaaacgacggttgaacttcatacgacctactggagataagtcatagcgttcagaagagaagaacaagttattgaataagttttcagcagcttcttttgttggtggctcgcctggacgcattactttgtagatttctactaatgcttcttcacgatcacgcgtcaagtcagcacgtaatgtatcagctacgaatgaaccacggtcaatatcgttagtgaacaagatattaaattgcttaacaccaccttctgccaacttcaccattacttcatggcttaacagagtatttgcagcaattacttcaccatcacgtagagtaatatcttcagcagtgatacgctcatataagtattcatcaggaactgaaagcttagttaaacctgcagcttccatttgacgtacatgacgagcattaatacgtttaccttgctcaacaatgactttaccttcattgtcagtaatatcaaattgagccatttcaccacgtaaacgctcaggtacgaggtcaatttgatagctacccatgtcaagatacacaggtactttttcatagaacaaattcaagatctgttcattgttataacctagtgcacgtaacacaactgtagcaagtaatttacgacgacggtcgatacgtacgtaaactaagtcttttgcatcaaattcgaagtctaaccatgaaccacggtaaggaatgatacgtgctgaatacaacactttaccacttgagtgggtcttacctttatcatggtcaaagaatacgcctggcgaacggtgtaattgagatacgattacacgctcagtaccgttgataacaaaggtaccattttcagtcatgagtggaatttcacccatatagacttcttgttcgcgtacgtctttaattgatttagtttcgcgatctttaataatcaaacgaattttaacgcgcattggtgccgcataagtcgagccacgaagaatacattcgcgtacatcgaactcaggtttaccaaggctatactcaacaaattctaaagcagcattgccagaataactttcgataggaaaaactgaacgaaatgcggcttggagaccgatatcttcgcggttttttggtgatttgccatcttgcaagaatgttctgtacgaatcgacctgaatcgataataagtacggtgcatccattacttggggcaatttaccaaaattcttacggatccgtttcttttcggtatatgagtatgccatctggagtcctcggaaagtaaaccaagcccgcctgcagaacgggctcagaaggaattacgcaggccgatatggccaccactgtttacaaatgctgcaatttttagtggtataaaaacgcttaacaatatttttaaaaatgaaaaatattggtaagcatttgaatttatttattttatttaggctttctctaaaaaccaaacaaaactaacaaaaatcgagccgattattgtaacgcaaaaaggctgatgacccaagagccatcagccattttatggagccgatttaaaaaccgactccttttacaattacttaagtgtaactgtagcaccagcttcttcaagtttcttcttaagttcttcgccttcttctttagaaacgccttctttaagaacttgaggagcgccttcaactaagtctttagcttctttaagaccaagaccagttgcttcacgaacagctttaattacagctactttgttagcaccgaaagaagtcaactcaacgttgaattcagattgttcttcagcagcagcagcagcgccaccagctggagcagcaacagctacagcagctgcagatacgttgaatttctcttcgaaagcagaaattaattcaacaagttcaagaacagttttttcagcaactgcatttaagatttcttcgttagttaaagccatgagaataactccaaatggatattgaatggtgtgtaaaattgattaagcagcttctgactcgtttttctctttgagtgctgtaatgaggcgacccaatttcgaaataggagcttgaaggacagaggcaagcatagtaagcgctttctcttggttcggaagattagcaataacgctaacatcagcaccttgataaactttgccgtcaaatgcagcagcttttaattcaaatgctttgttagttttagcaaattcttcgaacaagcgtgcagctgcacccatgtcatcttcagaagttgaaaaacctagaattgttggaccaacaaggttgtcgttcaagatatcaaactgagtaccttgaaatgcgcgtttagccaaagtgttacgtacaatacgtgtagttacacctaacttacgagcttcaacacgaagtgttgttaattgctctacgcttaaaccttgatagtcagcaacaacggctgcaaacgctttagaagcaacttcacttacttctgcaacgatctgttttttgtcttcaataagaagagccattgtaaaacctcctaaggtgatttatgtacccaatgggcacactcccagttcgtaagtctttcgacttacacgcggaggaggaacaaatcacaccaccgcgtctacgcaggctggtttattaagaaaatcgctattcgaaaataacgtcttttcgcctgaggtctttgacgctgataaattctcatttatcaattcaaagtccgcctgataagtaatagataaagctttactctaccgaagcaaaagcagaaataacttttctgttttatgcttaatcctcatcaggactttaaaattctttacttaaccaagttaaaacttagttagaaacgttgtttacatcaacagtaagaccaggacccatagttgagctcaaagtgatcttcttgatgtatacacctttagaagttgcaggttttaactttttcaagtcagcaactaaagtttcaacgttttgacggattgcagcagcatcaaagccaacttgaccaatcgcagcgtgaataatacccgctttgtctacacggtaacgtgcctgaccagatttagcgtttttaacagcgccagcaacgtcaggagttacagtaccaactttagggtttggcattaaaccacgtggaccaagaattgtaccgagcttaccaacaacacgcatagcgtcaggagcagcgattacaacatcaaagtcaaggtttccaccttggatgctttcagcaaggtcatcaaaacctacaacatcagcaccagcttctttcgcagcttctgcttgcgcgccttgagcaaatacagctacacgtacagttttaccagtacctgcaggtaatgtagtcgcaccacgaacaacctgatcagatttacgtggatctacgccaaggtttacagagatgtctaaagattctttgaactttgcagcaggcaagctgttaagaacctgtactgcttcttccaaagtgtaaactttgttcgcttcaacagcagcagcaatggctttttgacgtttagttaactttgccatgtcttatagctccacttccaagcccatagaacgtgcagaaccagcgatggtacgaacacgcgcgtctaagtcagcaccagttaagtctggttctttagtagtcgcgatttcttctaattgagcacgagtcaacttaccaactttagttttgttaggtacagatgaacccttttggataccagcagctttcttaagaagaatagaagctggaggagttttcatgatgaatgtgaacgacttgtcgttgtacacagtaatcactacagggattggaagacctggttcaactttttgtgtagcagcattgaattctttacagaatgccatgatgtttacaccacgttgacctagtgcaggaccaatcggtggagatggatttgctttaccagctggaacttgcagcttgatatagccgtcaatcttcttagccattttaaatacctctgggtacaaacgccgttaggctccccaatttctacgtaacaatactgttacaacaacaatgcccgataaaatcgggcgcttttcaaccaattaagattaaatcgttttttcgacttggcgaaattcgagttcaacctgagttggtcgattaaacacgttaatcgtcaacgttaaacgtgacttatcgtattgaacctcttccaccacacctttaaagtctgtgaatggaccgtcaataacaagtaattcttcacctggctcaaacatcgtcttaggacgtggggcttcaccagtattacgtacacgcgcaagaatcgcatctgcttcacgttgagtgattggcgcaggtttttcaggtgtaccaccaataaaacctaatacttttggacactctttaacaatgtgccaagtatcgtcattcatttccatttcaactaacacatagccaggaaagaatttacgctcagatttacgcttcttaccatccttcatttctaccacttcttcggtaggaacaaggacatcaccaaagctatcggcaacagcgctacgctggattcgttctttaagtgaacgcatcacttgtttttcataaccagaataggcatgaataatgtaccaacgtttcatagctcttttacccgataatcaacttaattaaccaacccaaaccatagtcaaaacaccataaaactaatgatgcaacaactacaaccaatagaacctgccacgatgttgtgactgtttcttgttttgttggccaagttactcgacgcaattcgactcgtgcatctttcagcaaacgaacgaagcctttaccttgatgggtggcgtataataaacctaaagccacaacgatacaagcaaaaattaccccaacgcgcacccaaacatcatttgcaggggcccaatacgctggtaaatgctgattcaccatggtagccgagagcaataatgcaattgctatcacccatagaacgatatctaaaggcgaaccagaacgaacaacttcagcagaattatttctttgaggaattggcgcgtcgctcaatgcgtcacgcgatttatcattcgacatttttgtactcgtcgtagaactcgcgacttattatatgaacaactaagccagcatcaagctttttatttcaaaatatggcaggtcaggagggactcgaacccccaacattcggttttggagaccgacgctctaccaattgaactactgacctataaagcaagttgagagccaaagctctcaacttgagacgtaattcgtcactatattatgcttatgcagttactttagcaacaacaccagcacctacagtacgaccaccttcacggatcgcaaaacgtagacctgggtccattgcgattgggtggattaattctactgacatttcaacgttgtcacctggcattaccatttcaacgccttctttcaactggatcgcaccagttacgtcagttgtacggaagtagaactgtggacggtaaccatttaagaatggagtgtgacgaccaccttcttctttagaaagtacgtatacttctgcgtcgaatttagtgtgcggcttgattgtacctggtttagcaagtacttgaccacgttgtacttcttcacgcttagtaccacgaagtaagataccacagttctcacctgcacggccttcgtcaagaagtttacggaacatttctacgccagttacagttgttttaactgtatctttaataccaacgatctctacttcttcaccaactttgatgataccagcttcaacacggcctgttactactgtaccacgaccagaaattgagaatacgtcttcgattggcatcaagaatgctttgtcgattgcacgctctggctctgggatataagagtcaagtgctgctacaagagcaagaactgattcttcaccgtaaggaccagcttcaccgttaagcgctgcaagagctgaaccacggattactggagtgtcatcacctgggaagtcataagtagaaagaagttcacgtacttccatttctactaattcaagtaattcttcgtcatccacaaggtcgcatttgtttaagaatacgatgatgtaaggtacacctacctgacgagaaagaaggatgtgctcacgagtttgtggcattggaccgtcagttgcagcacatacaaggatcgcgccgtccatctgagcagcaccagtgatcatgtttttaacgtagtcggcgtggcctgggcagtcaacgtgtgcgtagtgacgagttggagaatcgtattctacgtgtgatgtattaattgtaataccacgtgctttttcttcaggtgctgagtcgatttgtgagtaatctttcgcttcaccgccgtaagtttttgcacaaattgttgcaatcgcagcagttaaagttgttttaccatggtcaacgtgaccgattgtacccacgtttacgtgtggtttattacgttcaaacttggctttagccatgatgatcttcctcgtttacgtcgaaccacctacaaatggcgctgagctaactcagtttatcgacatatcgcctaaaaaaaactagacacctaatacttgaaaagcagactatatagcctgctttttgaaaactttgtggaaatccacattaaactttaatatctggagctcttatcgagatttgaactcgagacctctcccttaccaagggagtgctctaccactgagctataagagcgactatccttcgatggagcgggagacgaggatcgaactcgcgacatgcagcttggaaggctgccgctctaccaactgagctactcccgcaacgttggtaataaccacttcactcgaagtttagagatggtggtgagagaaggattcgaaccttcgaagctttcgcaacagagttacagtctgccccctttggccgctcgggaatctcaccaatatcgcacttatctacagtgccgttctttactcaatcaactcaacactttaaaatggtgccggcacacggattcgaactgtggacctactgattacaagtcagttgctctaccaactgagctatgccggcgtttcttagtgtttcgtacgtttcgtatcggaacggtgtgcagtttagcaaaacttccaaacgatgcaagcggttttttaaaaaaaaccgctaaaaactcataaaatcaatccgtttgatgataattcaaccgctttgatcactgcgcgagcttttatttgggtttcattccactcagattctggatttgagtcagcaactagccctgcaccagcctgtacatacacctttttatcacggataacacaagtacggattgcaatcgacatatccatttcaccatgccatcccaaataaccaacagccccgccaaaaactccccttttcacaggttctacttcatcaataatttccattgcacgaatttttggggcacctgataacgttcctgctggaaaggtggctttaaatacatcaagtgcatcgatatcatcacgcacttcaccttgtacatttgaaacaatatgcatgacatgtgaataacgctcgatcaccatttgatccgtgacttggactttacctattttcgatacacgccctacatcgtttcgcccaagatcaatcagcattaaatgttcagcaatctctttttcatcagacagcaaatctttttctaatgctatatcttcttctttagttttaccgcgcggtctagttcctgccaaaggtcgaactgtagcaataccattttctaaacgagataaaatttccggtgatgagccaacaatatgaaatggttttttatcagtaatcgtttgcccttgaaccaagaatagataaggtgatggatttaaatgacgtaatgcacggtaaacctgtaaagcttctccatcaaaatcagaaaccatacgctgcccaggtacaacctgcatcacatcgcctgcacggatatactccttaaccttctctaccgtctctaagaattttgctttaccagtaattgattcaaaatgcggaggcgtatgtggtcgcgcttgcaaactaactggagtcgccaacaactgttctaattgatctaatttttgttgagcgtcttcataagcattactctgctctgtatccgcatgcacaattaaaaatagcgtatctttaagattatcaaaaacaatgactgtctttgagagcatcaaccataaatctggtagcgtaatcggatcagccgcaggtacattctttaaacgtggctcgatgtagcggacagcatcgtagcccaaataacccaccaaaccgcccgtaaagcttggtaagtccggtaagagtttagccgcaggaactttaaattgtttttggaattcacggatatattggaatgggtctagacaattttgctgtgttactgatccgtcagcatgttgtatagataaaacaccagcgttacaggaaaaaactgttgattcgcctaaaccaatcatagagtagcgcgcccagttttcacccccttcaacagactcaaataagtaagcctgtgtttgatccttaaaacgagcaaaaacagataatggggtttctgtatccgctaaacgttgacgataaacaggaatagtattgtaaccagcagccttaagttgctcgaattgcgctaatgttgtcatgaatcttctctaatatggtttcgatttaaaagtgtgtttttctagattcggtttagacacgccatcgaaaaaccatacgcttattcattcttatctccattttcttcattagacaattaactcagcaagactatcaacaacttgctgaggttggcaatcatagatattctctccatgattatagccatagctaaccacaatacaatcaattccagcacgacgtgcagcttcaatatcattacttgagtcaccaatcatcaatgattgtgaagcagatatttttaggctttccatgcaatgcaataatggtagtgggtgcggctttctttcaggtaagctatctcctccaagtacaacttgaaaataagaagaaagctctagctcatccagtaacccttgagcaagtttgacaggcttattagtcacacatgccattttgatattcaaagtttggcaatgttttaaaaactcaggtacgcctgggtaaatttgagtattcacacacagctccgcaccatatacctctacaaatttctgtaataaaactttatgttgttcaacatctaattttccaaatacatgaagcagaacactctcacaaagttttgaagcccctttacctacccattcccgtatttgtgcttctgttaccaatggccaactgagtgattgcagacttaagttcatagaccgatataaatcggcagcggagtcaaccaacgttccatctagatcaaataaaattaaatcgcgcttacttagttgtgcaacagacattttcttctactcaaaattaaaaaggcatgcgtttagcatgccttgattgtaaaagcaccaacgaattatttaaagaataaccacgccaatacagctaaaatcactaaaataataatggtcactagaccaatagatgcattcttttgctgctctttctcttcagtaacccgagaaactggctcctcaatagcaacaggagtttgttctggctgagcatgaatatccaccccttcaggaatcggtgctggttttggcacagaaacgcgctgaggcattccatcacgactcacttcagtttctgctgcacgctccgcaatacttggcataccttgatcgcttaaatcttgtgtcggtgcagtttgtactggctccacctcaatttcaggtaaatcagtattttcttgtgcaggggcgaaaactgaaaattttaaacttgcgaattgaacaatatcaccatcatgcaactgtttttcttgctcaatacgaatatcgttcacaaacgtaccattcgatgaattaaggtcttgcacccatagcgcttgatcttttaacagcaatgctgcatggcgtcgtgaaatttcagcagcctgtagtaataaatcggcatcttgatgacgtcccaccaacatatcacgatcaacattaatttcttggccagtaaattcaccagtaattgcttgtaatttccaagtcatgcctatgtcctattcattttttattaatcataacatgctactacggcgctgtgcttggacgcagtgtcgttgttgttactgtatttttagtacgattaatttcaggatcaggcaactgtagggtttgcttttggacggtaggttctacagctaccggcgtagttatggtcgaacttttaccacctgatggaacctgttggtaattttttggcttggaggcaatactcggcggggtcattttttggttataaatatcatcaacttgctcaggtaattttgcaaagttgccatttttatccatagccaattgcaagctataaagttgattatagcgctgctgagataaacggcgtacatcatttgcatcgcccacaattgttgggtgaataaaaacgagaaggttacgttttacattgcttctgttatctgatcggaacaatcgcccaacataaggaatactacttaaaccaggtataccttgtcttgaaagcgaagtgtcatccgacaccaaaccacctagcaccacagtctgcccatgctcggctaaaacagctgttttaatagcgcgtttacttgtcaccaagtcagctgcttgcccacggctatcttgaacagcagaaacttcttgctctacttctaaacgaacagtacccccttcaccgatatgtggaacaactttcaaggtcacaccgacatctttacgctcaacagttgtatagggattgatacctgtactattggtagtaaccgaccctgtgacaaatggaacgttctgacctacaacaatataagcttcttcattatccatcgtcacaatggacggtgtcgaaagtaagtttgatttagtattggttttgagagcctgaattagtgcaccatatgccttacgagaattatcaaaattgcccaatcctaaagttgcaccattacctttattagctccattagcgatagcagatgcagctccagccgaaccacccgataaataaccagcagcgatagaagataaactcgcccctacattactaaagctaagtaaaccaatcccactagataaatcaccgagtgcccattgaattccaagttgatctgcatcatctccagagacttcaataattgcggcctcaataagcacttgttgacgacgaacatctagttgttgaatcgctgattcaatttcacgcattaattggggatcagctttaactactaatgagttctgagcattatctgcaataatactcacaccgttttgattaaagctggtgatattattctgattactactgttcgaattaccgtttaggttaattgcaggagttgaaattgaggcaccatttgaacccgatgtatttgaaccagaattctggttattaccaattaaactattaatcggattcgatgagttagatgaattattactattattcgatgaagatactgcctgtcctgtgactaagccttgcaaaatttcagacaagtttttagcactggcatacttcaaacggaaaacttttaagccacctaaacgatctgccgaaggtacatccagcatctcaatcatatgacgaatacgtttacgtgtttgcggatcaccttttattaaaatacggtttgtccgattatcagcaataatacgaatacgggcaccactaaaatctttagatgcgcctgttgcgctcatcgcttcaagctgggtaataatttcttctgcttggctcgactgaagcgtgatcgcttcaatatcattttgcccagttccatccaagttacgaataatattttcaagttgataaatattcgcagctctatcagaaacaataagtgcattggttcctgcaattgccgccatatgtgcaaattgtggcattaagggacggagtgctggaattaagtcatttggattagtattttccagccaaatcacacgtgtaacgatttgatcaccacggaccctatttctagaatcataaggaattcccgagtttttaacattgctatccggtacaagcttaatggtattaccagaaggaattgcaaccaccccgtttacatttaagaccccaagaaataggtcataaacttcatctttatttaatggcttattagaaataaccgtgacattaccacgtactctcggatctacagcgaagttctttcctgtaatgtctgcaacttcattaataaaggcagttaagtcagcatcacgtaaattgatcttccatgtttgggcataggcactgctacttactgtcgcaatcaatggggctgctgcaagtaatgcccaaagtggacgttgatgattcaataaagccataactcgcgatatttcctaactcttatggtgacgtgttatcactaaaaattttgttgtatggtcatcacttgatcaccacgttttatttctatttttacttgccctgctcgacgagcctgctcaagtaattgcacatccgtttgcccttgcccaaccgtttgaccattcaaagagacaattcgatcgccaggccttaaacctaacttatttctaagtgcagtcggtgtacgttctgtaacttcatagccttcacctgagttaccacttacccccatatctcggaggtattgctctcggttaccttgcatctgctggatcgcttgtcccaatgcctgttgggccgtattcataggctctgtagattgagatggtgtagcactttgttgtgaagcatccggagtcattggttgatataaaccatttggcaaacctttgaactgaagttcacgggtactgccatttccttgactcaacacaacacgatcccaatacacctctgccaattggtaagaagttgaaccaatggtttcaccaactcgataacgctcagcagtattatcaattttaataacagcagaggaaaaccggtttggatagccgaccattacaccctgcaattctaaattcacgctttcttgagccgcattggcagaaggttcgttaaaaagtgaaaaagtactaatatttggtatttgtggttgttgagaaccgagttctacccgatcaaattgcatcagttgaggaggcgcaatcaccaaccaaaaaaatgaagcgagtttccagcataaccataaaattaaaatggcaaggaccactacactcagtcgatctaatttttgccattgcaattgctgtaatttatcaatccatactttcattagttaccaccttgtaataatggttggcgagaactaatgacaaaagtatccaaaccagctttaccgtcatatgatggaacattgagtaataaacgctgtgtgagctgaacatccagcatcatattggcatctagtaaaagattggccattttttgattacgctgatcacggatgtccacttgtagctgtccgttctggtcagttaattgcccacttaaagaaggcatattcatacgatcttgacgatcaccaatattataaatgagcgctccaccaccccaatgcaattgcccatcaactgccgcaaagccttgctcttttttataattaaattggatatctttaagttgaatactatttacaggccattgccaatttacaatttgcttcagtgtttctggagcaatctggccattcatatcccttacaataactttttttccaaaaccatacgccataatccccgttaattgcgtattaccactatgaatatcaacatctgcagcaaagcgtaataaaagtaagtctagcggtctcgttttccagtggatagtgcctcgtaacgctccacggtgccagtctgcctgcccctgccagatattgccacttacattatggacagtttgattattctttgaaaatttagagataagccaagtcgccggaatctgtaaaataataaaaattaaaaatgcaatgagggcaaaaaaccaccacttccattgcttagactttttcttcattcagccttaccaacatgcaaattatcatccttatatgagagttcctctctagtctgacattatgcatactttttcaacatcgccaattcacttcatataaaaaaaccaagcaatcgggcttggcgtctcgctaaagactataagttgaacgtatgacaaaatcatgaaatttacgattgatcttgctaaatgaaaatttagtctcaacaatgctcttaattaggaattcaagcaccttatcgaatattcatatttaaaattaaattttttaattctttttaaaaataaaaaagccaagcagaatcgcttggctttttaagagacaatacaattagattaagaaatcttcaagttttgcacctttttcaatttcagcaactaaccaacgtggttgtttaccgcgacccgtccaagtctcttcagcattgtttttgttacggtaacgtggttctacagatttacgtgttgttttcttacgtttttgagcgccaaattctagaagttgttcaacactaaaacctacattttcagcaatctcgataatttgattataagcatcttcgattgcttgatcttttttgcttgcaattaaagcttctgcttcttcttgtaagcgttttaactcttcaacagataattcactaatatccggtttcattaataaatactccagtcttactgacaattcaaataatacagacaaaatttaaaaacattaaatcataaccaatagtatttataatctattcaataagcaatagtttgaaagtcaagttcatcagaataacgctataaatttactttttaattacattagtaattataattgtaatatattttcttaatatttatttaagctaaatgtattaaatcatgcccaactgatttttctaattcaataattttactttttacttcacttggtatttcacattttaatcctgtcattttattcacacaaaccataactgcttcacctgtagcaacgatttgctgctgagattcactccataatatataagccatacggaacgcgctcttacgtagctcttctacacgaacccctactttcaatacatctggataaaacacagattttaaatatttgcactgacttgaagcaacaacagtatatatatttggagtcaatatatttacattttccatatataaaatacgtgagctttcaatatatctataatattgcacattattgacatgaccaaaagcatccatatctccccatgctactttctggtcgtatattacagggtagacagacagttctttcatttttacctcagattttaaattttaaaaaattcgcatcattttcaaagattaggtttaactgtttgattaactcatcatcttcttttaaggttgatttaatacgtaaatagctcattaaaatattatcagggtataaacttaataatatttctgcttcagcttgacgacctgttgccatgtaaacatgccattttgcaaatgttaaaactggcaaattcatatattgagattcaaattgattaatcttttcttcaacatcggcatagtcaggaacctgcttaagcaattgttgctgaaaccataagtaaaatacgtccggatcgaattgctctttgagtaaatgcaaggttaatacttcatgctgaatactcatttctggcatacgggccaaaagttttaaccataacaatttactgctataaggtctggtttgaatttctgactctaaatccagatagcgctgttgcagtgcttgtaaatcatctattgaagcttgatcaaactgttgaagaagttgttgtagccataaatcacgatgttcagcgtccaacaaaccatatttcatagaacgcaagtatacccatggttgttgtaaagcaagctggccccaaagcgctgttaaacgttgttgatatgctgtctcaatctcttcaagccatggcgataactgatgctgatataaaaactcaagatgggttaaggcacgttcagcttcgttttgtgccaagaatatttcaatacgctgtaattctgctaactcaaaagccattgggggggattgatccaaggcctctaaagctttttggtaatctccacttaaaactagaaatttggcatcaataatattttttagaaggcctgattgagtaaaaacacgttcgataaatacccgttgatcttcagcagcctctaataaccagacaatacctaattgttcatacggatgaaggtttttaaactgaaaaatattctctctctttctttgttcccgagaagaataacgcttaatccaaagccatatcacctgagcaataaagctcatcacaacaaacgtaaagactaatccccatacatttgtttgcaattgcaattgccgccagtaaatataaacatatcccataccatagccataacttaataaagccaaggctgcgaaaaggactaagctaattaaaaagtaaacccacaggagatgcttcatgtgtcctccttatgagccgattagaccaagtgtcgataatttaggaacaggcactactgataaatgtgccactttagcaatacggtttttgagttgttggctagtcgcatcgggtaattcatttagtttttgcattactgtctgcaactcattttgatattcagccatttttccttggtttaaagcttgctcagcaattaatagccttaattgcacttctttaagcactacacttcggttcattaaattaatagacggcgtttctactttctcaatacggaaccattttttccaccatgacacagcctcggattggtccatctcaaatttaggctgttgtaaggcttgctgaatatttttatcaatattctggagtaaatcatcaatgagttgatgtcgctgattttgagcaagtacaaactgttgaatcgcctgcttatcttgctcaagagcctgatttaagctgtgttgtaatgcaggagcaattccatattgtggtagggtttgctgtagttgggttagatgatctacagcataaataaattgctgttggtcaattgcaaactggattaactctaatttttgtttaattaatacggtcggtgcaattccggtttgaacaacttctgtcgttgctaaaggcgttgttttagaattatgacttggttgattttgaatttgtctttgcaaagcaaccaattgatcattcaaattggcatattgctgttcagattgcagcaagctttgctgaagttcagggacggtacgagaaatttgccacatatcgtagctgagcttagccacccaagcgatgcccagcaaaatgatgatagaaacaagttttctcatacgaatccttataatgcctgaatgtgatgaatcatccccgaaggcgataaattttcaagttgaataatgtgaaaatgagcttgttgctgatcgcgatagtctttaacaagttgaaaaaggcgtggtcctaaaactaaatatacgcaatcaggttgtgccttattttttaaacaaagctctaaccagtatttccagctcgcctcactggtaattaagacgagccatttatctaaattataatttgaattctgtgtcagatgtttgaatgtcgaatatgaagcttgcggacactgccggcgatatagaacaaaatttaaaatctgaattccttgctgttgcaaagtttccatcataaattgacggccgccttcccctctccaaaaagccacactacctgatttttgcatatgatgaagaagaggcaagttaagcattccctcggaagtttcaacctcaggaacatgcgcttcaatcccatagtcgtgaagacgattagccgtcgcctgccccaccgcaatccattgaatatgttttagctcatctatttttaaaccactttgtgttaaatactgcatccccacatcaacagcagtgggactaaccactacaatcgcttgtgcgccagttaactgctgatagagttgagagagtgattctgaaaaaggttgagcaaccagttctaaaagaggtaaagactcgacctgaaaccccttattctgcaaagcatgagttaattcagccgcacgcgagtcaggtcgggtattaataaacaacatagcgttagtagagggcctttaataaatcaccagcgccttgatcaagtaagttccgagcaaggttttcacctaattgctgagcattattcgcttcatctgtaagctcagcccgtaataatgtttgcccatcaacactccctacacggccttcaatatgaatttttccatcttggagtgttgcataacctgcaatcggcacctgacaaccaccttcaagatacgcattgaatgctcgctcagcacgtacacatacatctgtctctgggtgtagaagtggctgaattaaagtcaacacttcttggtcatctgcgcggcattccaaaccaagagcgccctgaccaaccgcaggcaaacttacacttggctcgatacagtggcgaatgcgttctgccaatcctaaacgttttaaaccagcactcgccaagataatagcatcatattgaccatcgtctagcttcgctaagcgggtaccgacattaccacgtaaatcaataatttgtagatctggacgttgttttaaaatttgtgatttacgacgtaaacttgaggtgccaacttttgctccttgcggcaaatcagcaaatttttcaaattgattcgaaacaaaagcatctaacggatcttcacgttcgcaaattacggccaaagttaaaccttctggtaatgccattggaacatctttcattgaatgtacagcaaggtccgcacgaccatctaaaagtgctgcttccaattctttaacgaacaaccctttgccaccaatttttgctaaaggtgtatctaaaattttatcgccctgcgtgacaaacttaaccaactccaccgttaaatctgggtgaagctcctgtaaacgggcacgaatatgttctgcctgccaaagagcaagtgggctttgtcgtgtagcaattttcaaggttttcataaattcaagcatgggctggtcaaacaatacaccctaaacttaacttgatcccttaaaattgcaagtaaaatctcacaagcaaaaataagatgaatacaggttaaagttggtgtatccgttctctaagggtagataaatgacggcggcttacggaaagtctttcatctaagccacgtaagcgaacctgatattggcccgaacttactagctccaaaccatctaaataagcaatcgagaccaatgcattacggtgaatacggatgaactgatctgcgaactcagtttcaagttctttaagtgtttcgtcaatcaatacgctgccatttttatgacgtaccgtgacatatttctgatctgctaaaaagtaatagatattttcaacaggaattagctcaaccccacgataggttttagcagcaatttgatgacgttgtgtttttaaatcctgtaaaagctcaggtttaggcaaagcgctgagctgcgcttgcgttagctgggttaattgcttaaatgtctgctccagctcttgaggatcaatgggcttaagaagataagcttgtgcttgtgacttaaatgcctccaatgcatgctgatcataagctgtgcaaaacactatggcaggtcgaggattaagttggcttaattgctccgcacagacgagaccattcatacccggcatctggatatcaagtaaaatcacatctgggtgatgaagccgtgcctgttccaaggcatcttggccatgatgagctgttgcgacaacctcatgtcccatctttgaaactaaacgtgacaatcgttccactgcaagtggttcgtcatcacaaattagcaccttcattcatcctccttgtcaccgttaacttggtccatttttttatggttaactctgactgacttattattttgattggtattgatagctcataatagtggtatataaagcctcacccttatatacctggaatctcactgaattcccataatacgcttttaagcgctgtttaacattttcaagagcgattccatgccctttccgtgaatttattgtatcgtgtgtataagggttggtaatgactatactgacctgattttgcaatatttcaaccaataccccaatggttgctttacccatcattggctctaccccatgaaaaatactattctctaataaaggttgtaatgtcaataaaggaatagtgacctgttttaattgcaaaggttcaatttccactttccattcgacttttaaacgctcgcccaaacgtatttgctcaatcattaaatattgcttactaagctcaatttcttcatgcaagctcactaattttaattcttgaaaactcgcccgaaacagtcgtgacaggctaattaacatactttctgctttatctggatctatcgttattaaactcaccacattatttagactattaaataaaaaatgaggatgaatgcgagcctgcattgcctgaatacgggcatttaattctgcatattgttggtgtaaccattgttctcgaacatataaataacgcagacaaaaggcccctaataatattccataacttaaatataaagggacattggtaaaataaatgctccagtcctgcgctataacagatgtttttttcaaaactccaaactgaaaaaaattgcttattatggtggttaccacaactatcgcttgcagcataacaaagccaattaccaaagcatatttttgctgtagctgactaaaaaaatcctgaaaatgttcaaccaaggcaaaaaaagacaaaatcacccagttaataaaaacgatatattgtaaaagacgtgagccgtttaatgcatgccaagactgcgcttcagccaaagctaaaaccagagctaaaacattacttgcgataattaattctaataaatgttgccaacgatcaattttcgtaaaaaaataggaggaattttgatttcgatatgctgtagaaaacaactttgtttgttgagcttcggcaagtgatatactcttttttattttactgagccaccatgaccacatcttcaaatccccctaattcagcagccccaaaccaaacctcaggtatgtggggtggtcgtttttctgaagcgacggatgcttttgtagccgaatttaccgcctctgttcaatttgaccagcgtttttataagcaagacatcgctggttctattgcgcatgctaccatgcttgcgaaagttggcgtactgacagaagcagaacgagacgacattattgaaggtttaagcaccattcgtgcagaaattgaagctggaacttttgaatggcgtatcgatcttgaagatgttcacatgaacattgaatcacgtttgactcaacgtatcggtattacaggtaaaaaacttcacactggccgtagccgtaacgaccaagttgcaactgatatccgtctttatctccgcgacgaaattgacgacattttaggcttattagagcgtttacaaaaaggtttgttgggcttggctgccaaaaatgtaaatactattatgcctggctttacacacttacaaacagctcaaccggtaactttcggccatcacttgttggcatggtttgaaatgttagttcgtgatactgaacgtcttcaagactgccgtaagcgtgttaaccgtatgccacttggttctgcggctctcgctggtacaacttacccgattgaccgtgcttatacagcagagttactaggctttgaagctgtatctgagaactctcttgatgctgtatctgaccgtgattttgctatcgaatttaatgcagcagcatctttaatcatgatgcatttatcgcgtatgtctgaagaacttattctttggacttctgcacagtttaaattcgtaaatattcctgatcgcttctgtactggttcttcaatcatgccgcagaagaaaaaccctgatgttccagaactcatccgtggtaaatctggccgcgtatttggtgacttaattagcttacttacgcttatgaaaggtcaaccactggcttacaacaaagacaaccaagaagataaagaacctttatttgatgccattgataccgtccgtggttcactcatggcgtttgctgacatgatccctgcattggttccaaatgttgaaatcatgcgtgaagctgctcttcgcggattctctacagcaactgatcttgctgactacttagtgaaaaaaggcgttgcgttccgtgatgcgcatgaaattgtaggtaaagctgttgcattaggtgttgctgaagaaaaagatttatctgagttaacacttgagcaattacaacaattctctgacctaattacagcagatgtatttgataaagctttgacactagaagcttcggtaaatgcacgtgatcatattggcggaacttcaccaaaacaggttgaagctgcgattgcacgtgcccataaacgtctagaacagttatacgcttaaggatacaaaatgagtcgacaagtattttgccgtaaataccaaaaggaaatggaaggattggactttgctccgtttcctggtgccaaaggccaagaattttttgaaaatgtttctaagcaagcatggcaagaatggttacagcaccaaactacgctaattaatgaaaaacgtttaaacgtgtttgaaccagaagcgaaaaaattccttgaagagcaacgtgagaagttcttcaataatgatgagagcgttgaaaaagcggaaggctggaaaccagaataacaggttattccaagcccatcattttaaaaaaggcaggtttatatacatagacctgcctttttttacgtgaaacttacacaaacatataaagccttacatagagcgcacaggactctacatgacatgaaatggctgaaactttaatatcaattcatagcaagtaagacacgatccctgtcgtgttttttcttaatgcacttgattttctgtcctgaacttccccccaaagttcgggacatttttttatctattattttaaaaaataaaaaagccttgtctgaaacaaggcctttaaatatttcagctcacatattacttttcgtgtacttttgcttcaatttcttcaattttggtatggcgtgcatcaaagccttttgccatgtaaatgacttgttcagcaatattacgagcgtggtcaccaatacgctctaaagaacgtaaaacccacatgacattaatcacacgagcaatatgacgcgggtcttcaatcatataagtcattaaagtacgcgttgccgactgatattcacggtcgatgtcagcatcggctaaaagtacacgtaatgcttgatctgcatctaaacgtgcaaaagcatcaagtgcgtcatgaatcatgacccgtacttggttaccaatatgacgtgtttccatgtagccacgaggagaaccgccctcttcacatagattttgcgcaatacgggcaatttttgcagcttcatccccaatacgctctaggtcagtattggctttactcatggcaattaccatacgcaagtcaattgctgccggatgacgacgtgccaaaatcagcgtcagcccttcatcaatatcacgttcgtattgattgactgcattatctttaaattggacatcaattgctaagttcgcatctgtatcaagcaaagaatgaattgcattggcaacctgttgttcgaccaagccacccatggtcataaactttgtgttcacatcttgcaaatcttcattaaattgagaagaaatatgatggcttaacaccggattactcggactcaagggaagcctccaacatgatggcgcagggataaaatgattgagcattaaaacacatcaatcattaaatttttatgacaaaattaaatttcagataaaagcattttttattactgatacgttaaccagctgtttaattcaactagatctttttcccctagctgacctacagccgcttttaaacgtaatacatttaataaatagtcatactgagcattaagataatcctgttttgctgaaaaagcattacgctgcgccaataaaacatcgaccatactttttaagccttcgttataacttgcttttgaagcttgagaaacaagtgctgaagagtccattgctgcctttcttgcttcaagttttgctcggtcagtatctacctgcataaaagcacttttcacatcgacattggcacggcgaatggccgcatcaagttgggcttgcgctttatttaactccacactggcttttttaatagaagttcgagtccggcctccattaaataagttccagttcatctctaccccgacctgatcaaacttcccatcagtcgaaatcagcgtttcgggcgtttgtttagtataaccataactcgccactgcatctatctgtggataaagtgcagctttttccacacgacgttgatcttcagcatatcgcttttgtaaacgtgcttgctgaatctttaaattttgttgttgggctaatcctaaccactcatcgagctgtgccggataaggtttttgaaagataaaatcacttctcaatacagcaagcttatcttgatacggaccaatatattcagatagttgctcttgagccaatagaagctgcacattggtagcaatacggttggctcgggcattttgatattgggcatttgcttcactcacatcactacgtgctaccaacccttctttaagcttggcgctcatcatattgagctgttcaagcaaggctttttcttcttgtaaatatgcagcggtaagtgcctgctgacgcaatacattaaaataggcttcagctacatttaaaacatgatcttgtttttgcagtcttaaagtaatttcactaagggcaaccgaagttttaacctgtttataaccttcccatgcatccatacgaaaaagaggctgacgggcagataaagtagcctgtttggtagtcgatgtattacttaccaaagcatcggaaagtccttcctgatcaacaccaggaaaatttgaacgctttaccgtttgtcgattacgggtaatatttccagataatgtaactgttggtagtaacgcgcctgttgctaagcctaaattaagctgatctgcttcaaactgttgttgattcgcttgccacgtcggatcatttagttttgcgcgctcataagtttcaactaaatctagagcaaaactcgacgatgtaaaactccataaacccgcaacaagcattaattttattttcattgtttaaatcaacgataaaacttggctttaagactaagaaaaatttaatttaaactcaagccagtaaaagttttcattttttatgtattttcaggctttgataacatcaaaatacaaatgaaaatcaaaaacatgcctgcccacccaatccatgagacactttcgccaaccaaaacaatggcaaaaatcgctgcaacaagaggttcaaataaagttaaagtggtggcttgactggcatttacagtttttaacccgaaaccaaaaagcaaataacccaaaaacataggaatcagcatcatatagccagcaacaagtaaatttgttgaactttgcagtagcccaccacctgtaattaataaagttggaagcaagatgactgccccacctcccataatcatgcccattgcagctttagctgcaatacctcggtctattaatctttttgcagcccatgaataaagtgaataggttgcacccgctaccagcccaagaaaaataccaaaaattttattccattcatttgtactctcttgtgctgcgtggctttcgcccatagataacaaacttacccctacaacacccaacacaaaacttaggaaccatgttttagataaaactttacggtcaaagaatcgctctaaaactgctgcaatgagtggagccgaaccaattgaaaccaccgtaccaatcgtaattccggcataatgcatggaagaataaaaagctagggggtatatcccaactgccacaacacctaaaagaataatagaaatatttcgcccaataaattgtcggtgttcccggatggcccgagatgcaatcaatgcctgtaaaagcccacctccccccatagcaaccgcgccaattgcaagtggaccaagtgttggggcaaatgctgcggctgtccccgtggttccccataagaaagaggctactaaaattgcaatagtgccaccataactactatttttaataaggctaatcatgttggcattctcgatctaaaacatcttctgccatttgtctcgctaattgaagttgacggctactaccctctaaaccagctcttgccatcgacccttctaataaaaaagaaagttgtgaggcgatatagctaacacgctgtgaatcttttaataagcgatttaaatgctcggcaacaatcgcctcaacttgttctttatgctgtcttacagcatttcgccctgaactatttgctgggaactctgcggcagcatttaatagcccacatcctctaaaacccttttcataagcaaactcggcatgatcttgataggcatcaaatacggccaaaatagcttctttcgctgtttttgttttttctaaacgcttttgataaaggtctaaccactcttgatgtcgtgcagcaatataggcatcaacaagttcaccttttgaagaaaaattattgtaaagcgacattttagctacatctgctttagccgtaaccgtattaattcctgttgcagtaatgccatcgttataaaacagtgttgccgctgcatcgagaattttctgtcttgctgttctatcattcatagcttttacttaagtagaccgacctacctaataataaagatttctaacagtgatgcaatctttttaagcgttataatttgagcaatatcaatttcgataaaaatataaagatgaaaaaaattctaatgatgagtatgtgcggcgcactacttttaactggctgtaataaaacatcacagcaagatcaaactgtatctaaagagcaaaaatcaactgcgcaaaaggccaccgaacagcgagacagtagctgcttacaaattatggtagccatgcacacgattaatcagaacagtaaaatagaagacttaaatcaaattaatgaaaagcttaaaacctgtgttccttcgttaaaaaatgaggaacagcttaagctaattgatgcatcaacaaccatgtatcaacgttttattaaacaagactacactgaaaaaacagggagagcttttgaagcatttggctatgctgttttagaacagaaacaagaccttaaaaaggtgattcaaagtcagaaaaagctcttcgcccaactgagcccgcgtgatcaatatttacttcaacatgaaggccaagcctatattgagctgctctatcaaggtgaaggtatgtttacttatcgtcgccagccaaactacttagttgatgttttttctaaggctttacccgctgaccagaaagaatttttatctcgtatggcaaaagacaatcaagacattttctataacgatggtgctttggctgtttcatggaaagagcttactgaacgtgctttattttgggaaaagtttattcaaaaatatccaaagagttattttattaatgatgccaaattactctttaatgaatatcgatacttcattttctttggtctagataacacacctgtgtcgaatgaatatgccccgaacacatggtttgaccctgatgcacttcagcaaatccgctttttatcaactcagagccaatccagcttagcaaaacctgcccaacaatttctgaagtttattgccacccctgtcgatgagcgcaataagcaatttaaaatagatttaactgatgaaaatgggcaaaagaaatctacctatcagattgtgcatgaacaacttgagcagctattaaaatttgattcgccatggaacacagaagtctatcgtgactgccatatagatgcggtttgtatagatacaaattgacaatgccagccaacctaaaacatgttagtctttaaatcgcttgacggagcgcgagtaatagctcgctgagattgtgtaaatttcgtgttatcgcaacaccagtttgatcacaagtaccgttgaacctgatcaggttaagacctgcgtaggaatcaagccatctgaaaacctaagccctcaatttatctagttcaagataaatccgccatcgtttttggtcgtgcttgattcgttgatgttattcataaggatcatgtgatgaaccaattaacgaatctctcttctgctgaaatttcagcacaacatgaacaagatgcaaaagacttaacccgcatcttacccgcttctaaaaaagtttatattgaaggctctcgccctgatattcaggttccaatgcgagaaatttctttaaccgataccccaactggccttggtggtgagcacaacccacctattatggtatatgacacttcaggtgtttatactgacccgaatgttcaaattgatttaaacaaaggtttaccttcagttcgtcaaaaatggattgaagagcgtaacgatactgacgttctttctggcctaacttcaaagtttggacaggagcgtttaaaagatattcgtactgctgatattcgctttgcacatattcaaaacccacgccgcgctaaagcaggcaaaaatgtcactcaaatgcactatgccaagcaaggtattatcacgcctgaaatggaatatattgcaattcgtgaaaatcagcgtcaacgcgaagctgtagatatgcgccagcacccaggtcaaaactttggtgcgaaaaacttaaaagaaattacacctgagtttgttcgccaagaagttgccgaaggccgcgctattattcctgccaacattaaccacccagaacttgaaccaatgattattggccgtaatttcttggttaagattaatgccaatattggtaactcggcgcttggttcttcaattgatgaagaagttgcgaaaatgacatgggcaacccgttggggcgctgacaccattatggacttgtctacaggtaagaacattcatgaaacacgtgaatggattattcgtaactcaccagttccaatcggtaccgtaccaatttatcaagcacttgaaaaagttgatggtgttgccgagaacctgacttgggaaatctttaaagacacgcttattgaacaagctgaacaaggtgttgactacttcaccattcacgcaggtgttctacttcgttatgtgccacttacagcaaaccgtttaacaggtattgtgtctcgtggtggttcaatcatggcgcagtggtgtctcgctcatcatgaagagaacttcttatacacacacttcgatgaaatctgtgaaatcatgaaagcctatgatgtgtcatttagcttaggcgatggcttacgtccgggttgtattcaagatgcaaatgacgaagcgcagttcagcgaacttaaaacactgggtgagctgactcaccgtgcatgggaacatgatgttcaggtcatgattgaaggtccgggtcatgtaccaatgcacatgattaaagagaacatggacttacagttagaagtgtgtaaagaagctccattctatacgcttggacctttaaccacagatatcgctccgggttatgaccacattacttctgctattggtgcagccatgattggctggtatggcacagcaatgctttgctatgtgacacctaaagaacatttaggtttaccaaacaagaaagatgtgaaagacggaattattacctacaagattgcagcacacgcagccgatcttgccaaaggtcatccgggtgcacaggttcgtgataatgccttgtctaaagcacgtttcgaattccgttgggacgaccagttcaacctaagtctagacccagatacagcacgcagcatgcatgacgagactttaccaaaagaagcgcataaatctgctcacttttgctcaatgtgtggtccaaaattctgttcgatgaaaatcacccagaatgtacgtgactatgccaacaatctcaccaatagcgattcagaggttgaagaaggcctcaaagcaatgaaagaggtttatcaagagcaaggacaaaaactgtatcataaagtgtaaatattcaaaaaaaacacttgcctagccatgattctcggttaggatgaaataaatagatttcgtcctgatcgaatcatgagtattgtcgagcgtccaagttatacatctaaagatgtcgaagtaacatcacgtgaacctctgttcagtggttttattcaagttgaaaaagtcagccttcgacatcgtctatttaatcaatctgaatatactcctgtattgcagcgcgaacttgtgcatcggcctgaagcggctggcgttctactctacaatgatcaaaaacaacagtttgccctgattgaacagtttcgtgttggtgctttagatgactcccattcgccatggcaactcgaaattatcgcaggtgtattagatggcaatgaatcaccagaaagttgcattcgacgcgagagccttgaagaatcaggttgcgaagttcaggatttagagcatctatttagtttttacccatcagctggcgcctgttcagagttatttcatctgtatgttgccgaaaccaatttacctgctgtaggtggtgtttttggggtagataatgagggtgaaaatattcagctgcatttgtttagttatagtgaaattcaaacactactcgacagcggacgtttaagaaatgcccctgttattatggcattacaatggctggctcaacacagcaaaacgataataaatccgaagaggtaggacggtgacttttcaagtctcaacactttcacaaaaaaatcatgtcatcatacaaattaccgatacacatttattggagtatccacagctagaatttgtggggatgaatcctgaagaaagtttccacgccattattcaacagatactaaaacaacatcccgaagctgatgcgattattcataccggtgacctcgcacaagccccaacacctattacctacaaacgttatatcaattttatgcaaaccttgggtctgccttttttccagaccctcggtaatcatgacaatgtcgaccactttcctctacataacgaaaaccatcaacaacctgtagttgtcggtttaggaaactggcgtgtgattatgctaaatagcgcggtaaagggaaaagtagatggtcatctgtcttcggaacaattagaaaatttagcgaatttacttgaacaatttgcagatcatcctgttttgctggcttgtcatcaccatccatttgccatgaaatcaaaatggattgaccaccataagcttcaaaactcaaatgcacttttagataccttaagtccatttcaaaatgtgaaggccctagtctgcgggcatgttcatcaagattcccttaatatctggcaaggtatcgagtttttttctacaccttccacaagtgtacaatttaagccgtttagtaatgattttgcactcgaccaaaatgcgccgggttatcgttacattcgtctgaataacgatggtagttttgaaacaaaagtgtttcgccttgaaaatttcaaaacccgtataaatactgatatttcaggttattagccctaaagtttatataacccaaaagaattatgactagggtaaacacgttttgaaaatatttacgggacagaatgactatcatcttgcaggaaaaatctatatgatgacgacccgatggaaaaatccatcgatggttttctataaaaacacttgcatatcaccatattttttgcgtatagataatacgtgtatgatgaggaatgccctattatggcgaatgacaaccacaaccaagttttggatgaacatacagaagttgtagtagaaggtgataaagcttctgcaaaacgtgcacgtaaagtgaaacctaaaacttctgacgtaggctcaactgcaagtttatttggtattgcaccttatcaacctaagaaaaatgaagagtacatgtctgaaggacagctcgagcatttccgacaaattctgcaagcatggaaagctgaattaatgtctgaagttgatcgtactttaaatacgatgcaagatgaatcaactgcattgccagacgtaaatgaccgtgctacccaagaagaagaatttgcaattgaattacgtacacgtgaccgtgaacgtaaattaattcgtaaaatcgaacaatctcttgaagcgattaaaaacgaagactacggtttctgtgaaacttgtggtatcgaaatcggcttacgtcgtttagaagcacgtccaactgcaacgttatgtattgactgcaaaactttggcagaaattaaagagaagcaaaataacggttaattgtgacggttaagaattctccagccgagcttagttcggctcttgcgaatcagcgaaacgatgttccactgattcgctactcaggccggtttgcgccctcgccaaccggccctttacatttcggatcactcattactgctgttgccagttactgtgatgccagagcccatcaaggtcgatggttagttcgtgttgaagacaccgatattccccgcatctaccccggtagtgaagaccatatactcgcatcacttgaagcttttcagttcgatccggatgccgagatcatttttcaaaaagaccgcctagatatttacgaaagtgtattagaccaacttaaaaaagagggtctggtttacgcctgtcaatgtacccgtaaaatgctcggttcaaacgctatctatgcaggcacatgtcgagatttgcatctcgacttccaacatcaagccattcgggtaaaagttcaagatcagccaatctgtttcgatgaccgcctacaagggcttcattgttctaatctagagcatgaccttggtgattttgtccttaaacgccgtgatggaattattaactaccagcttgctgtcgtcgtagatgattacctacaaggcattactcatgttgtgcgaggtgcagacctgttagataacactgagcgtcaaatctggcttggtcagctcctcggctaccctaagctgagttacatgcatcttccgctcgccatgaacgaccaagggcaaaaactttcaaagcaaaaccttgcccatgcacttgatttaactaaagctcctgagttactacaacaagccatacaagccttaggtcaaccacaggttgatttagatcgccccgaagtgatgctcaagcaagcggtagcccagtggaatgtagatttgattcctcatggacaacaactttgcggaacatatctataaataataaaaagcccgatttgatatcgggctttttataacgcttcatggtttagaagtttgattcttccctctcagggttcacttcttgagttgaagcatcaatctttaagatcaagctaatcatagctgcacacatcattaaagacgtaccaccataactaataaatggcagagttaaacctttggttggcattaagcccatgttcatacccgcatttaccaaaatctggagtaagaaaataatactaataccgtaagccaaatagcctgcgcgaagataatgatgtttcaaggcacggtggccgattttgatacaacatgccagcatcaagaaagataagccaatgacaatcgaaataccaaagaaaccaaattcttcacctaacacagccaacataaagtcagtatgcgcttctggtaaataggaaagcttttgaacactatgccccaagcctgtaccaaaccactcaccacgaccaaaagccattaacgcatttgataactgataacccacacctaatgggtctgcccaagggtcagtaaacgaaatcaaacgttggaaacggtaaggttcaaataaaatcaaaaacacaatacccgtgacaattgcaccaagcatgattaagaattgtgttggaggcgcacccgctagaaagaacacaccgaccatcatcatgacaataaccaccgtcgcacccaagtcaggctcggcaataattaaacctaccgtaattgccataacgccacttaaacgaagtaagcctttccagtgggtacggacttctttggcacggcgtactacgtaatctgcggtaaagatggccatcataaccttggcaacctctgttggctgcaaggtaaaaccaccaattttaatccaacgtgtggaaccgttaacttccgaacctacagccaaagccgcaagtaacaaaaccatagttaataaccacagtggaaaggtatttttaaaccatgtattgagtgatattcgataggttaaataagccaccacgccagcagcaacgattgagatcccatgacgaatcacatagtgaaatgggttttcatgcatatattcagcataaggcatggaagcagatgcgaccatcactgaaccgatacataacaatgcaaccacacagaaaatcaagacattacgtggcgtcacttccgctggccatttcggcaatatccgttcataccaatgattgattttctggattgtggtctgagctaagcctgccatactacattcctaatcatattttctttaaaccaacgaattgacgcaggcaacaaactgctgaccacggtcattataacttttaaacatatcaaaacttgcacatgctggtgatagcaataccacatcttcagcttgtgtttcacgttgacacagctcgacagcttctttaagcgttgctgcatgtaaaattttagttgcgccttgaatggcttgctcgatgaccggcgcatcttcaccaatcaataccacaactttggcatatttttcgatagaagaacgtaaaggagaaaaatcttgccctttgccctgtccacctaaaataagtgcaaccttaccttttttcacttcaatggcagcacctaagccatcaattgctgcaagtgtagcaccaacattggtacctttagagtcattataataacggacatcacgcacagttttaacgtactcacagcgatgctctaatcctttaaatcgttttaaagtttcaagcattgactccataggtaaaccaattgcctcccccaatgctaaacacgctaaagcattggctacgttgtgcataccttgaatatataaatccgagcttttaattaaccgctgtaaaccacgagcaagccaaagcgtaccgtcggcatctcttaaaacgccatattgatttaaatctggtgcgtttaaaccaaagctttgcattggtgtcgtatctggaacaagtgggcggcttaaagcatcgtctcggttaaatacaacttttttagcgccttggaaaatacgatgttttgcttggtgataccccagcatatttccatgacggtctaaatggtcttcactcatattgagaaccactgctacctcagcgtttaagtgagaggtggtttctaactgaaagcttgataactcaaggactagtagctctggttgatctttaagtaaatctaacgctggtcgaccaagattgccgcctactgcaactttcttacctgcatccttagccattaagccaattaaagtcgttacagtactttttgcattggaacctgtaatcgccacaatcggcacatcagtggcacgacgcaataattggatatcacccaccacagaaatacctttagcaatagctgcctgaatttccggtaattgtggtgcaaggcctgggcttaaaataatctcttctgcttgtaataataattcttgatcaagctgaccaaaactggttttaacgccagccggaatctgatcgtgtccgggaggtgtggggcgggagtccgttacagcaacttggtagccttgttcatgcaggaaatttacagcagaaacacctgatattcccaagcctgctacaacttttaatccaccacgttgtattaacatttttgccccacaatttatcaatcgacagaatggcaaaaatgttagcactttgctgttttgaatgctttttcagattgaactttattcatctttttttgtgtcagtgcgtaaaaaagccatcaatatgatggctttttatacgaaacaggaatggctgaatttattgccatttaactggtttaatttcttgaattgtattagttggtttatcttcacttgagcagccacagccacctgcacaaccaaaagtcatttttggttttagccattttgctaaagttgcccaaccctgcttttcacaaaaaacggatagtgctgaaaaggccgagtttgctgtttttggaaatactttcttaaaaacaacaatagcactccaaatcactaaaaccgcaataatcagatattgaagcatatacaacctcctttactgctttaaccccaatagtgggaagcaatttgataggtaacaaacgatgcaaaataagctaaaccaaacagatatgcagtcatagctgcaacatgtttccatgaacctgtttcacgacgtactgttgccaatgttgccaaacaatgcggcgcataaatgaaccacactaaaagcgataaacctgttgccaacgaccaccctgtaccatctgcactaattaaatgagacaaaccttgtgctactgcatcttcatcagttgccgacaaggcatatacggtacctaatgcagcgaccacaacttcacgagctgccatagccgggattaaggcaatacagatttgccagttaaaaccaactggagcgaataaaggctggataaggtgtccaagcatacctgcgaagctgtaatctatagcaggcaatgttgccccttctggtggctgtgggaaagtacacaagaaccagagcaaaatagaaagcgcaaaaataatgccgccgacacgcttcaagaagatcttcgcacgatctaacaaaccgattcccacactttttaaatcagggaaacgataactcggcagctctagcagtaaagcgtgttgagacttatctttttggaaaaatttcattaagaatgaaacacacagtgcactcacaatcccagccatatacagaccgaaaagcaccagtccttgtaggttaaaaataccccagaccattttctctggaataaatgcagcaatcagcaaggcatatacgggtaaacgtgccgaacaagtcattagtggcgcaaccataatcgttgtaaaacggtcacgagggtcactaatactacgcgttgccataattcccggtactgcacaagcaaagcttgaaagtaacggaatgaaagcacgtccacttaaaccagcttgaaacattaatttatcaagtaaaaatgctgcacgcggtaaatagcccgattcttctagtactaaaatgaagaagaacaaaattagaatttgtggcaagaaaacaactacgccacctgcacccgcgataattccgtcaaccaccagactatgcagtagtggctgtgtaatcacagaacctactacttcacccagccagccgaagaagccttcaataccatccataaaaggtgctgcccatgcaaaaactgcttggaacacaataaacatcatgatggcaagactaagtaggcctaagactggatgtaagaaaattcgatcgagaaaatcagtacgcttgtcttcctgatcaacataatgaacaacatctttaaaaatcatatcgattttttgatgatgagtccctgttaaaccactcagttcagtttgtggcacactgtatttttcttgatcaagggcatgtaataaattttcaatacccgcattacggacagctactgtttcaacgactggtacacccaaacgttgagataacttttgagtattaatctggatgccacgacgacgcgcttcatccatcatattcagtactagtaaaatcggacgacctaactcgatcatttcgagtacaaggcctaaatgcaattttaagttggtcgcatcaaccacacataaaaaagcgtcttgttgcccctcttccgctatttttcctaaacagacatcacgggtaattgcttcatccggactggtcgcattaagactgtatgtacccggcaaatcgagcactcgaaccgaacggcctgaaggtaactgaaaatgaccaactttacgctcgaccgttacaccagcatagttggcgactttttgtcgagttccagttaaatggttaaaaagagaggttttaccacagttagggtttcccacaagggcaatacgtaacgcatcactcatgcgggtactccttcttctacttgaatttcgattttttccgcttctgctttacgtaaagcgaaacgagtaaagccaatttggattaagatcggatcaccaccaaaaacacccttggtaatcacttccactcgcgtgcctggtacaaaacccagactttccaaacgaattgcgaccaaatcttgctgctcggactctacttctatccgattcactttggtgatggtcgccgcttgcttcactttcaacgctgataaacgcaccgcatccgatcctaaaccttttttactagtatacatataaatgagaataattaccaaataaggttagatttcaattcttatggagtttaatcgacaaaccttaaagtttcttttacagtacagtggtttagaggaagttgtttatgataaataaaaaaccgcgtattccgagccctgttcaaattcctgaacatttaagctttttacaaggttttcgcgactatctggttgcacaaacagtcagtccgcatacgcgcaatgcctatttatccgacctgatccaatgtagtgaacttcataaaaaaaatagattgccagattggacgagcgatgacatttctgacgtcctcattgaacttaccaaagtagggaaaagcccacgctcaattgcccgttgcttatctgctctacgtcagttttataaatttctacgtgaacagaaattacgaagtgataatcctgtagctactcaccattcaccaaaaattggccgagctttacctaaagacttgtgtgaagaagatgtagaagcgctcattcaggcgccagacattacaacggcgttgggcttacgtgaccgagcaatgtttgaagtcctttacgcttgtggtttacgtgtctctgaattactgaatttacgcctcgaacttattaatttaaaacaaggttacctgcgtattacgggtaaaggtaacaaagaacgtttagtgcctttaggccaatatgcctgcgattgggtggaacgctatttaaacgaggcacgtccacaattttataaaagttcaactgactatttatttttaacccagcacggtggaattatgagccgtcagaacttttggtatgccattaagcgttatgcgctacaggccaatattcaagctgaactttcacctcacaccttacgtcatgcttttgccacgcatctacttaatcatggggcggacttacgcgtagtacaaatgttactgggtcatagtgatttatcaaccacgcaaatctatacgcatgtagcacaagtcagaatgcaacaattgcatgaaaaacatcaccctaggggttaaaattttttaaacgaatatttcgaaatacctcaaacaatcgcttgatttcgttcacaaaggttaagaaagttttaacaatacactctagattttttgttatgcttagcagcttctgactataaatactgatgaaataagggttatctatgtcctttacccgatctcaaatttttcttgcctgtgctttggcttctagcctgttgttcagtgcttgttctaaagaaaacaaaccacaaaaagaagatgcgctcacagcgaccgcacctgctacaggggaagcttcaaccattattgaacgcaatgctaaacagcgtttaattgaaactttgcaaaaacaatttaagaatgcaaacatcaacgtcaaaattttagatattaagcctaccgaagtgcctaatttatattgggttaaccttgaaggaatgacgtcggtttatacaacaagtgatggtaaatacctgattcaaggtgatgtcatccgtttaggtgataaagaacttcataatatcggcgatagccttcaagcctcagaaaacaaaaagcatcttgctgctttaaaaaatgaagacttaattgtttatccagctaaaggcggtaaagctaaacatgtgatttatgtgtttaccgatgcaagctgtccttactgccataaattacatgagcatttagctgagattaatgagaaaggcattgaggttcgttacattgcatggccacgcggcgaacagtttatgccaactatggaagcggtttggtgtagtgcagaccgtaaagctgcatttgaccaagctgtacagggcattagtattccacctgctcaatgtaaaaaccctgttcgcgaacaataccaacttggtctaaacatgggcgtaaatggtacaccagctatttataatgttgatggtgagtacttgggtggctacttaacaccggatgaattgattaaacgattggataaataaccctctccaagttgatgaacaattcctcatctatcttacaaataaagcgctgatattattgcagcgctttgttttttcaataaatacttcttttcataccagtgtttaaagagtgatctactcttcttttccaaacattgcactctaaatcactgaacaggcgctaaaagcgctagagtctggcgttttttttagctatgatctagcttcaattaaatgattcaatgatgatatggagtgtgacgtgaaaccagttcgcctggcaatactcggtctaggtaccgtaggtggaggagcccttaaactactacaagaaaatgccgctgaaattaaacgtcgcaccggtcgagaaattcaaattacccacgttggaacacgtcgtcctcgtccagatctcgaattggaagggattaaacaaagcgctgacttacttgatatcgttcgtcaacccgatgtggatgtggttgtagaagttatgggtggtattcatcctgcttacgaaatcattatggaagcgatcaaacacggcaaacaagtcgtgactgcaaacaaagcattactcgctgaacatggtaatgaactatttaaagcagcagaagataatgctgtacaaattgcttatgaagcagctgttgctggtggcatcccaattattaaagtaatccgtgaaggccttgcggcaaaccatatcgaatggcttgcaggcattattaatggcacaggtaactttattttgactgaaatgcgtgaaaaaggccgcgcatttgatgatgtattaaaagaagctcaagaactcggttatgcagaagcggacccaacttttgacgttgaaggtattgacgctgcacacaagcttacaattttagcgtcttgtgcgtttggtattcctttgcaattcgataaagtctataccgaaggtatcagcaaaattactgcacaagatgtgaagtatgctgaggagcttggtttccgtattaaacatctaggcattgcccgccgtgctgaaaagggtattgaactacgtgttcacccaacacttattccagatgagcagcttattgcgaacgtaaacggcgttaaaaatgctgttttagttcaagccaacgcagtaggtccaacgctttattacggtgctggtgctggtgcaggcccaacagcttctgcggttgttgccgatgtaattgatatcgttcgtgatatttcttatacagaagatggcgcaggcacaattcctcaactggcttttgaagcattaacaaatatgccaattttaagccgtgaagaaatgaccacaggttattacatccgcttaaatgctgaagatcagactggtgtacttgcagatgtgacgaccatcttaagccgtgccggaatcagtattgatgccatcatgcaacaatctcgcttaaaagacctcattccaattgtgattttgaccgatccaatcgttgaatccaaaatggatgacgctcttgcgcaaattcaagcattacctgcaattcgtggcgaaatcgtaagaattcgtttagaatcgctcgatagttaatcaggttgagggaaagattccctctcccgcttcacctcataattggaacaccatcatgtctaatgccaatcgttatactggtcttgtagatcgttatcgtgaccgtttgccagtttcggcaactactcgtgctatctctttgggtgaaggcaacacccctctcattaaacttgagaatattccacgtattattggcaaagacgttgaaatttatgtgaaatacgagggcttaaacccgactggttcatttaaagaccgtggtatgaccatggctgtaaccaaagcagttgaagaaggctctaaagcaattatctgtgcatctacaggtaacacttctgctgctgctgctgcctatgctgcacgcgcaggtatcaaagcgtttgttttgattccggaaggcaaaattgcgatgggtaaaatggcgcaagccatgatgtatggtgcgatcactatgcaaattcgtggtaacttcgatgatggtatgcgtcttgtaaaagaagtggctgatcaagcacctgtaacgattgtaaactcaatcaacccttaccgtttgcaaggtcaaaaaactattgcttatgaaatcgttgaagctttaggccgtgcacctgattaccactgcttaccagttggtaacgcaggtaacattacagctcactggatgggttataccgaagcagtagctaaccagcctgctgaccaatttgaacaagttgtttatgacgctgcgactgatcaattcactggtccaaaaccagaaggcttaccaacaatggtaggttatcaagcttctggcgcagctcctttcttacgtggtgctccagtagaaaaaccggaaacagttgcaactgcgattcgtattggtaacccacaaagctggaaccatgcaaaagctgtagtacgtgactctaaaggttggttcgatgaacttcaagacagcgaaattttagaagctcaacgcttactttctatgtatgaaggtgtatttgttgagccagcatctgctgcttctattggcggtgcaatccgtgatattaaagcgggtaaaattgctgaaggttctgtcattgtatgtactgtaacgggtaatggcttgaaagaccctgatacagcaatcaaacaatgtgctgatgcagtgatgttgtcaattgatgcaacaatggaccaagtaaaagattcgattttatctaatatgtaaaatctgagtttttataaaaaacggctgtttaatacagccgtttttttatgctttttaaatggcataaaaaaacgcttctaaagaagcgtttttaaaaataattaaattaaatacgttttggcaaattacttaaccaaccgagcaagttagttgcatcgttattacgtgcctgagtacttggctcacccaataatacaatcactgctggacgtgagttcacagtagtatgcataactacacaacggcctgcttcattaatataaccagtcttagataagttgatattccaaccaccattacggactaaagcatttgtattatttgatttaagaacacgataacctaaattaaagtcataggtcggtgtggttgagaactgacgaatcaaaccatattgagatgctgtactcgccaaaattcccaagtcacgcgcagaagatacattacgcggatctaaaccagttgactcataataatgagttgcattcatacctaaagcacgcgctttagcattcattgccgccacgaatgcagcacggccacccggataagtacgcgctagagctgctgctgccggattttctgacttcataagagcaaacagaagaacttctgctcgattcattttatcgccaacacgaagtgttgagcttgaatttttcccgccagccccagcaaaatcaatttgctcaagtgtaatttcttcagacatgtttaaacgggcatctgccgttacaactgccgtcatcaatttggtaatagaagcgatcggcactgatgcgttggtatttttactataaagtacctcacctgtttgtgcatccattacaagtgcagcacgtgcactaacactcggctgggcgttataacccacagtatcacggattggagcaactttaggggtagaagtaataactctcggcgcattactgccacgcaatgttgtagttacagaagttgaaccttgcggagtcggttcatcatcttcatcatttaaaagttgactagcatccgctgcagaccaatttaaacttgcagtaccagtactccctgaagacgggttattgacgagttctgcaaagcttgttgaactcaaactaagcaaaatagacatgcttagcacatgcattaaagactttttagaatttttcacggcacaatactcgactcagggtgacacacatttgcgcttactatcattatgccttacatttgagatataaggtataaagcttttaccgacacaattgtgcacaactattcgctcactatagaagaataggattgctaattttgtcattccattgcaagcttattttgctttatgtaacaaaaaacttgttttttgaaagaaaggaggtcttcttgattacagttttagttgtcgatgaccatgaactggtacgtacgggtatttgccgtatgttagaagatcatgccgatgttgaggtaattggacaagccgaatcgggcgaagaagcaattgctatcgttcgccaacaacatccgcaagtcgtactgctggatgtcaacatgccaggcatcggtggtgtagaaacaacccgtcgtttattacagacggctccagagacgaaagtcattgctgtaagcggcctcgccgaagagccttacccatctttattattaaaagccggtgcaaaaggctatatcactaaaggcgcgccaattgccgaaatggttcgtgcaattaataaggtcatgcaaggcggtaaatattttagtgcagatattgccgaacaactcgcgagctcatatttatccgacactcaacaatccccttttgattcgttatcggaacgggaaatgcaagttgcaatgatggtcgtcaactgtattagcgcccaagaaattgccgataaactttttgtaagtgtgaaaactgtaaatacttaccgttatcgtatttttgaaaagttaggaattgatagcgatgtaaaactaacacatcttgcgattcgttacggtttgatcaaaccataaccaaatttacatgcaatttcccttaaattcatccttgtcccatacgatttttcgtttgggcacttggtatggcttataccgtcttattattgcggttagcctgaatattattttggttttaaccgatgcgcaaactgataacagtttgcagcaacctgccttatattcctacacactactcgggtattccctcttaagtcttgttcagctgttatgctttaaatttattgctactcaagccacgcgacagcttattttattttttattgttgatattatttgtttgagtttactgactttttctgtgggtgaaccaaatttacaactcagcttactctatgtaattgccatctttacctcggcgattttacttagcgcaagaatgtctttgctgattacattgcttgcggttatcgctgttatttaccaacgatttgtaggtagtctatttgactataacaatctaaatactattggtaatagcgctctcttagctttcttattttttgtggttcacggtattggccaaattgctgtgcagcgctttaaattacttgaagcactcacctttcaccagtcaattgaactttatcaactccaaaatattaaccgttatatcttagaacaaattgaagaaggctatttagttttagatgagaattacgacatcgttgtcagtaatcctgcggcctgttcactcttgggtattccccctcaatttgccaatgaaaaatatcctttagcaaagtggcatgccgatttatttgaaattttaaagtttggcgacttaaaagaaggtgaccgattcatttttgagtctcggctatcggcgtactccatcaacattaaagtgcaacatcttttggtcccacaacaaacgctaaccctgctcattttacaagatgcacagcagattaatcagcaagcacaacagcttaagcttgctgcgctagggcaactctcagcaagtattgcacatgagatccgcaatcctctcgctgcaatcgtacaagcaaatgagttactgaaagatagcgatccagaacaacaaaatactttgcgtcatatgattggcaaacaaaccaaacgtattgatagtattgttcaagataccttagggcttgctcgtagcgaaagaacacatcctatccagatcgatgtaaaacacttcatagttacattgctcgaagaagatttatttgacgttaaacattcaattcaacttaaaatttcggatagttctttaaaatttttatttgatgaaaaacaattaagacaagtcatgattaatctggtgagaaatgctttacggcataatgcccccgactcaccgtacattacgatcaacattcattcacagacaaataaaatttatattgatgtgatcgattacggtgaaggtgtttcaaaacgtgatatatctcaattatttaaaccattttttagtaccgaaattaatggaactggtttaggattatatttgtctcatagtttttgtgaggcgaaccatgcaaagctcacctatgtagagcaaaaacaaggggcatgcttcagaatagaatgcccaataatatattgatttttttattaggtttttggggaaatggcagaacagcaaccactggttttgcttgtagacgatgaagaagatttgtgccttttaatgcaaatgacacttgcacgaatggggattaaaacacatcttgcttatcgggttgaacaggccaaacaactcttcactcagtttcattacgatgcgtgtttaaccgacttaaacctacccgatgggagcgggatagatttagttaaacatgtctctcaaaattatactaatactcccattgccgttttaaccgcctacggcaatatggatattgcaattgcagcattaaaagcaggcgcttttgattttgtaagcaaaccggtcaaccaagtacatctagatcaattattacaaaaagccttgaatcggcaaaaagtagagcatgatgctgctgagaatgcgttagaaaataaattattaatcggccgttctctacccatccagcagctacgtattgcaattaaaaaaattgcgcgctcacaagcacctgtatttgttaccggtgagtctggaacaggtaaagaagtagttgctaacttagttcatcggctgagtaaccgtagtgaaggcccttttattgcgattaactgcggtgctattccaaccgaactcatggaaagtgagctttttgggcataaaaaagggagctttaccggagcaactcaagataaacaaggcctcattttatcggcacacggtggcagtttatttttagatgaaattgccgaattacctttaagtatgcaggtcaaactgctccgtgcagtacaggaaaaaaagatccgacccgtcggttcagatcaggaaatcgatgttgatttccgtgtgattagtgcaagtcatcaagatttagatttattggttagacaaggtaaattccgtcaagatttattcttccgtattcatgttatggacctcatattgccacctctacgtgaacgtggcgaagatgtccttttactagccaatcactttattcagaaaatttgtatggagtgggaaacgccacctaaacaattaacagaagcggccgaaacttatctgctacagcaacactttccgggtaatgttcgcgaattaagaaatatgattgagcgcgcaattaccttaagtgaagataccactatagatgtatctcatttacatcctgctccactaagagcaaatatttctaatccttttgcttcagctgctcaaagcatacaaaccactgtggcagctcctcaagtcgtaaaaaaattaccaagtgaaggcttagaacgttatttagaaaatattgaaaaagatattttactcaatgcactcaatatgactcattggaatcgtaccttagcagctaaaaaattaggaatgactttccgctctttacgctatcgtctgaaaaaatttggcttagatacggagacagaacaggaagtataaaatttattttctttttagaaggagatcggcaacacgatctagataaacttcctctttcatttctggaggtaagggataagtctggttaggctgaataccttgcccctcaatcatattaccatttggtgtgtagtaatgtgagactgtcatttgtagcgctgccccacttggtagagggaaaagcttttgcacaacacccttaccataacttttttcacccatgacccaagcacgttgatgctctttcattgcagcagtaaaaacttctgctgccgaggcagatcggtgattgattaaaataccaacttttatattttgaaaatcgttacctggcaaagcctgaaattgctgattgccttctgaacgactttttgtagagacaataatgccatgatttaaaaataaatcggctgactcaacagcagcagataacaagccgcctgggttatttcttaaatcaattaacaccgcttttaaacgcgaagaactattttcttcaattaaacgcttaatctcattggcggtatcttgttgaaatactctaatttttaataccaacacctgattgtgcaacatcacaggctcaatatcggtttcaatctttttattacggactaaactaattggactatttgactcttctgtttgtacttgaagcgtcgagcctatcgatccataaagcaaacctagcacctgatcatgtgtcagatttttaagttcctgattatcaatctttaaaatagtttggccatttcttaagcctagtttatatgagtcagaacccgtcttaaggtcacgaatcatccatttatgaacatgtgattcggggcttagtacaaaatcaactgaagcaagatccccttcagtatattgaatgagttgacggtattcttcagctgacaaatagcgggagtaacggtctagaccactgactaaacctttaattgcctgtaaaaataaagcatcgtccgatttttcatcgacatagttatcacggacgatcccatatatttgtacaaactgttgaatagactcaataggcacttctgcataactttcttctgattccggggaatcaggatgcagagacgataatttttcttttacaacaggagctgcaaaagcgagctggctgcaacacatcaatacgctaacaaaaaaagctttatatatattgtattgcagcatttagtcacctattgcttaagcagacaatgtaatgagattacgaccttgcatttcagcaggcacaggaatctgcattaagttcagaatagtcggtgcaacatcagcaagcacgccaccttctgcaatcgttgcttgggttggacccacataaataaaaggcacaagctctgttgtatgctgagtatgaacctgaccactttcataatcttgcatttgttcaacattaccgtggtcagccgtaataagcatatggccttttttcgccattacagcttcgtatacacgacctaaacatgtatcaactgcttcaacagccttaactgcagcatcaaatacgcctgtatgaccgaccatgtcaccattggcatagttcacaacaagtaagtcgtactcacccgagttaattgctttgactagctcatcagttacttcatacgcactcatttcaggctttaagtcatatgtcgcaacgtttggtgatggaattaaaatacgcttttcacctggatattcgtcttcacgaccaccactaaagaagaaagtcacatgggcatatttctcagtttcagcaatacgtaattgcgttttacctaaagaagataaatattcaccaagcgagttctttaactcttcaggcatatatgccacaggtgcatcaatgcttgcctgataacgcgtcaacatgacaaatttagaaaggttcggtacaactttacgctcaaaacctgcgaaatctttttcaacaaacgcacgcgtaatttcacgggcacggtcagcacggaaattcataaatacaacgctatcgccatcttgaactttagcgatctcaccaatacgggttgcttttacaaactcatcattttcatttgcagcatatgcaagctctaagccttcaaccgcagtagttgcagtacgaacagcttcaccttccgttaataaacggtaagcctgctcaacacgatcccaacggttatcacgatccattgcaaagtagcgaccaatcatggttgcaatacggcccttgccttcatattgagcgaataaagcatctaatttttctaatgaaggttgagcactacgtggaggagtatcacgaccatcaaggaatgcatgtaagtaaactttcgcaccgcgttttaaggcaagttcacacatcgccacaatatgatcttcatgtgaatggacgccaccttctgaaagtagccccataatatgaactgcaccacccgctgcttttgctttttctacggcatcaaccaatacttcgtgctcaaaaaaagcaccagtacgaatatctttagtaatacgtgtgaagtcttggtataacactcggccagcgccaaggttcatgtgaccaacttcagagttacccatttgtccatcaggtaaaccaacatcttcaccagaaccagaaatgagactatttggatgctttgctttcattgcagttaaattcggggtttttgctgcaagaaaagcattatcttcaatcgcttcacggtgtccaacaccatccataatgaccagaacgtgagggatcttgccagcagttgcatccgtcataatcaatttctcttttgtctacaatttcatcgcaatatcttaccgaattttcggtgaagactctattttttcctatggctttccccaatgctcctcattgagaaagtcattcatatactttcaatttaacgggcccgataaagcaaataacttccggcaccaaacattaaaataataggcatgagtacaaaccaagctggtgaaggcgcgtataccaaacttgcgtagcccaagaagtcttgtaaataataaaagcctaaaccaatgaagagcgcgatcaccaaacggaaacccatcgactgttgacgtagtggaccaaaaataaaagaacaagccactaatacaagagtaatgagtgaaaatggagaagcgactttttgccaaaaagctaattggtaagttttcggtacttggctatattcgtccatataacgcataaaactaatcagctgacttggagacaagtcctcagggtctaaagtcaccatatgtacatatttaggctgtagagccaaacctaaagactgctgatcatgattatttagtatcgaattaccatctgtaagaatgtccatctggctggctttttgtaaagtccattgaccatcctggataaactttccttgctctgcattaattaaagactgtaaatggtagtctttgttaaagtctacgacctggatatctcttaaatttccttgtgagttcgcataatcaatataaataaaacgctgcccttctcgtgaccaatagcctttcacttcacctaaagcagcaactgatcgatggcttttgacactttgtgctttctcatttgtatagggaacaacccactcacttagagcaaaagataaaacaataagcagcaaagctgagcgcataacccaacctacaatacgccataagctaatcccgaccgaacgcatcacgatcagctcactattggatgctaaagcgcctaacccaatcacagcgccaattaaggctgagataggtaaaatttcatatagatagcgaggggcaccccataacacatagataaaagcttgccatgcattatagtcaggttttagctcacctaattcacccagataagtaaacaggatttgcaaaacagacaaaacaatggtggtaccaaacattgcgagcgcagtggttttcgtcacatatttggcgactattcgacgtgctaacattataatttcactcgcttaatctgtttcttgattttcggccctaatttctgcttacgtgaaaataaggcagctgcgattgcataaaccaataaagccactggataagcccaaatatccagttctcctttacttatacgagttttaattgcaatcatgagtacgatcaaactcgcgaaaataaagatagatggaataagacgataataacgaccttgtcgcgggcttacttccgacaatgccacagatagcatcaaggcaataataatggtaaacggaccaaataagcgccagcccaactcacttcttacgaccggatcatttgctttagaaaatagttttgatgtggaaagtgcttctacatcgccactctcaaacttaacatctttgtcattttctaaacgtagacgataagactggaactctgcttgtgtatattttggttgtcccgggaatatttcatagcgacgaccttgaacgagatcaaccacattggctgtatcattcgcgacctcaacacgagtcgcctcttttgccaaaatcatgacatctggcttgccttctttggctgcacgctgataaaagaaaatatctttaaggttttttcgatcttccgacaatgaacccgcataaatcgtataaggtccagaagaaataaactctcttggtcgcaccaagtcaaaccctgtacgcactgcttgagttgtagttaatttttcgaattcacgaagtccccacggcgtcatccaaagcataagtacggactgacacaccatgtaaaccagtgtcattggaataagtaagcgcgctaactgatgacgacttaccccactaccattcaatacggccatttcatggtcaacatataaacgaccaaacaccaacattaaaccaataaaaaacccaagtggtaaaatgagggttagaaattcaggtaaacgatatccaatgatgctaaacaagatactggcatctagtcgcccctgtgccgccacaccaaagtatttgatcagacgaccacccatcatgattaaggtcaataatgcaatgaccaccaatgaggtagagacaacttgcttgacgagataacgccgaataatcaaattaatacttccaaaaggctaatcgggacgaacgctagtttacccgaatgttaaaaatataaaaccgcacattgcaacgctatgcttgaaagtgtttcaatgtttcaatccaacataactttctataggcaatcacggcagccatgaaatttacaacttatacaacttttcctgaacaaacatctaatgaatctttgtggattttagttgattcagaacagctacaaagcaatctcaatacatatcaaatcaataatctagaaagtattcttacagcaactcaatttaaagccaacttcaatgaaacgttgccattatttggtcaacttagcactcagccccatagccaattacttggtttaggaaaagcagctgaacttcaagcagctaagttagcaaaattggcgcaaaccattatcaagtcggcacaaaataaatttaagcatatcgcaattgatattgctgcgttacctgtcgaataccattatttatttgcattaagcttaactcaagcagcttatggttatgatgagtttaaatcgaaaaaaaatgaatttgtgttacaacaagttgatttaattagctcacaaaccagccttgatgaaaatcaactcgctttagtacatgccgtacaatctggtcagtcttatgctcgtgacttaggaaaccgaccaggtaatatctgtttccctgaatatctggcagaacaggcattagctttagcggcagaattcccagacttacttaaagtcactgtcttaaatgagcaacaaatggctgatttaggcatgtatgcatttcttgcagtcagcaaagggtccgagcgtccgggccgtattgtgactcttgaataccaagcacaacttgaacaagctcctgtcgtacttgtcggtaaaggcgtaacctttgatacaggcggtatttctttaaaaccagggcttggcatggatgaaatgaagtttgatatgtgtggtgcagcttctgtactcggcacaatccgtgctttatgtgaggcacgtcttccaatccatgttgtgggtgcgattgcagctgcggaaaatatgccttcaggtaaagcaactcgcccaggcgacattgtaacaaccatgagtgggcagaccgttgaaattttaaacactgacgctgaaggccgtttggtcctttgcgacaccttaacgtatatcaaacgtttcaatccggcagttgtgattgatatcgcaacattaactggtgcttgcgtagttgcgttaggtaaagtactgagtggtttattctctccggacgatactttggcagcggaactccaacaagctggtgagcagtcatttgaccgtgtatggcgcatgccagtgattgatgattatcaagaactattggactctccttttgcagacatcgctaacattggtggaccacatggcggcgcaattacagcagcctgcttccttgagcgttttactcgtgactatcgctgggctcacttagatgttgccggaacagcatggttatcaggctcagcaaaaggcgcaactggtcgtccagtaccgctacttatgcaattcttggctaaccgtgtaagtacgaatggctaaagttagcttttatctgtttgaaaccagtgaagaacggcaagtcgatagtgcttgccgtttatgccgaaaaattttactgaagcattcacaaatctggtggtattgcccagatgtgcagttacaacaaacacttgatgaaaaattgtggagctttgatccgaccagctttattgcccatggcgttgatcaggtagatgcggcagtatgtatttcggctaaacaaccttctgaacaaggttggctggtatttaattttaacaatcatgcacttgaacaagtgaatcattttagccacattatagaaattgttgaaaataatgaagcagccaagcaaattggccgagaaaaatttaaaatgtatcgtcgtttaggtatagaacctcgaacctttaaattataacgcgctaaaatgtaaatactgttgagcaaaggagaactgtggtggcattaaatgtcgggcaagattttaaaaaaagatggttaaatgcgcctgaagctgtccgtcatgcttatcaacaggatttggctcggatttgtgatttattagagcctcagacccctattcaactgtgggttttaaatgacgaaaaagcgcaattagaatcacaacaaaatattgaaaaggcatatgctgacttaaaggcagagttaatcgagcaagcgcgaattcgtcgccagcttgcgttagaaaaagctcttgcagataagcgcgcaaaggaagcagcttatgctgctgaattacaagctgacgaagttcgtaaatttagtgaacaaacggaagctttgcaggctttacgcagtcatttagaacaagaagttgctgaacatactgcacgttatcagaaaaaccctgaaacgccagcaattgattattcttctggtgcaaaacttagcattactgacgatcaaatcttatctgagcttgaaagtgtacgtgttcgcctagaacttgaagctgaaagcttaattgaacaggcagtaacagttttccgtgccaaactgcatgctgcggctcaagaagaaattgaatatattttaaagaattctaacttttctgatgaaaaaatagaaaagtaaagttttaatattcttcctgtcataaaaatgacatttaattgtcacaaaatggtcatgcataatattcttatggttcaagcaattataagaataagtcatgattatttatgaaaattaatgagggtaagaaatggacattccgcatcagatttcaacgcaaattgagcaacttaatcaaggcgagcaatggaccttctcagcacaagaactttatatgagtcataacgactttaattcactttcaatcttactcacacgagcatcggaaaaaggcgaattttcaattactcgcactcagcataataaaccttgggtcggcacacactcagttactctcaccaagcattaatttttaaaataaaaaaaccggaacgtatgtccggtttttcattttggcaatttaaaaatttattttaaaaaaccattttcagctaagaaagccatactaatatttgattcggttttctgttcagcagctttatcacctagtaataagcgttcgatataacgtgctaaaacatcaacttcaaggttgaccttgctacccacttgccacgttccaatattagtacgctctgctgtgtgtgggattagatttaaacttaaaatattaccgcgtaaatgattaatcgttaagctaataccatctacagttactgaacctttctctgccaaatatttagcaagttctacaggcgcagtcacttcaaaataaattgagcgagcatcttcacgtactagggtaatttcacctacaccatcaacgtgaccacttacaatgtgtccaccaaagcgggtagtcggtaacatggctttttccacattgacacgttgaccaactttccagttacccaaagtcgtgcggtttaaactttcacgggacacatcagccgcataccagttatcaccccactcaatcactgtgagacagatcccgttagttgcaattgagtcacccaaatgtacgtcagacatatccaaatcggtttgaatacgtaaacgtacatcgccacctacactttgcaggctttctactttacctaaactttcaataatgcctgtaaacatggctcaatctccaaatcttttacactgcttaaattgcagcgcttaccaaagtgcgagctgtgtactattacctgatgtatctacaccacctagctcggcgaagtggtaaagctggcctaacaattgacgtaacggtggccctggtttggcatgagtatctgtaatcacaataaactcaagcacacgtgcacgctctgactgacgttgtttacttacgcgataacgtggaacatcttgagtaagtaaagtcacttttccacgttccagattggccatcagtaaatctttcggctcaatgttaccatcggtcgaataactggtcagaatataacgtgcattgatggtcgaaagtaatttttcatacgcatcttttgcatgtttagaagagttataaggacttggacgttctttacgccatgcacggtcaataccactcttatagcctttcgtatctggcggtggtaaatcgacttgatcccataacgtcaacgcatttaaaacgtgatagttactactgtaagcatgctgattataaggtgggtcaagataggctacatctacttcaaaaccgctcatctgatttgctagatgctgagcatctacacaccacatttcagcagcagggcgtttacggtcgccaatctcacagaaacggctcggtgttaaccaaagtagtgattcgatacgctctaacgctgtttgtgtacgtccgccccacccttggtggaagcttttaaatacaccactggtattactcacaaaacttgctgaatagagtaatggcgcaagcaaagcactcatttctacatcattaattgcaccttgcgcttgccatgtggcaatttgctggcgaatcgcatcgatgcgcataccattgcgacgtttaaagaataaacggtcacgagatggatcatagacatcatcattacgagggcaaagattgtgtgttacccagcctttaacctcgggtaagcggtttaaataatcaatcgctttctgatagccacccaactctttaaaagcaggtgcatcgacacacgctaaaattgcatgatttaaagcatgactataaggttcccagtcattcgcaatgacacggtatccattttgacgtgctaaacgagaaaccaccccactgcctgcaaaaaagtcagcaaaaatcggggggttctttttcttgctattcagcgtccctgtgatttccagagcttctaaaatcaagtggagcaatcggcgcttgttacccaagtacgggacaagctgatggaaaagatattcgtctgtcgtgcgggctgcatgacgacgtttgtggtataccgaaggctctgaattcatactttctcttgcgtagggattaaccttaagcgtatatcttgatcaagttgtgttacatcaagaagtttaaaacgaagttgctgtgccatatattcaaaatctgcattgaacatggctcttgcactttgccccaataaagttggagccacataactgatcatttcatcaatcaagccttcttgcaaaaaggcacttgataatgtcgcgccagcctcgatcagcacatcataaatttggtattgcttagataaggtctgtaatagtgtttttaaaggctgaatttctaattgtatcacgcctaagtcagcaagttcctgacgatatggccccatgaccatcacagtttcaggattttctaaaattttagcggtgagcggtaaacgccctctccgatctagaattacacgttttggctgagcaaccgtttcgatatcaacattatgaagtgaacgtacattaagttggcagtcatcggcaattacagtttcaatacctgtaatcacggcgcctgaaatcgcacgccaatgttgtacatcttgacgggccgcagaacctgtaatccacttcgactcaccagatgccatcgcagtacgtccatcaagactagaagcaacttttaatcgtacatatggcatgccggtagacatcgcttttaaaaagccttgattaagttgagctgccaaatcttcacaaataccgatttctacttcaataccggcattttttaatatctgaacacctttacctgcaacaagcgggtttggatcaggacatgccactaccacttttttaacttgcgccttaaccagcgcctcagcacacggaggggttcgtccataatgagcacacggctcaagcgtcacataagcagttgcgccttgtgcctgttcgcctgcctgacgtaatgcaaaaacttccgcatggggctgaccagctttagggtgaaaaccttcaccaattaactgatcatctttgacaatgacacaaccgacatttggatttggttttgtcgaatagagtcctcgtttggcaagttcaatggcttgctgcatccagtattgatcttgttttaactcagacataaaaatctcaaatgattagtgctcacgttgttgcatttgctcaatttggcggcgaaacgcttcaacatcctgaaaatcttgataaaccgaagcaaaacgaacataggcaacgtggtcaagtgcaaataaagattgcatgacaatctcaccaatcgttctggatttcacatcacgctcacccaaacgacgaatttgcaactgaatatcgctgagaaccgtctcgatctgctcttgtgtcactggacgtttttgtaaggcatgcataagcgaacgacgtagcttcgcctcatcgaacggttcattttttccattcgatttgatcacacggggcatcaccacttcatagctttcaaaagtggtaaaacgttcaccgcaacttacacactcacgacgtcgacgaatctgacagccttctgcggctagacgcgaatcgatgactttactatctgcggcgttgcaaaatggacaatgcatagcggacttaatagggtcaattactttgacctagtgtagcaaaatttctacacttacagaaccagcattctatgagacaaaaaacagccctgtccgagatcaaagcatcgctttgatcacagcacaagactgtttttgatataagaattattagtgattattcaatacgttcgccatgttggcttaagtccagacccatacgttcatcatcggaattaacacgaagtccaatgataaggtcaatcactttaagaataatgaaagttgcgataccactgtaaaccattgtcgcaagcacaccttcgacttgtacccacaactgaccagcgaatgttggtgctaatgctacgttggccgccttaatgatttcatcactataaaatacgccagttaaaatcgcaccgacaataccacctacagcgtgtaaaccaaacgcatccaaagcatcatcggctttaagtaagcgtttaagtgccgtaataccccagaagcagactacgccaccaataaggcccattactaaagctccgcctacaccaacaaaaccagctgcaggcgtaatcacaactaaaccagcaacagctccagacgcaccgcccaatacagaagctttaccacggatcatacgttctactaccaaccaagagaacgcagcagcagcggcagcaacttgagtcactaaaattgccatacttgcacgagcaccagcacctaaagcactaccaccgttaaagccgaaccaacccacccaaagtaaacttgcaccgattacagttaaagttaagttatgtggcgccatagattcacggccaaggccaatacgtttaccaagcatataagcagcaactagacctgcaacaccagagttaatgtgtacaaccgtaccgccagcgaaatctaatgcacctgctttaaataaccagccatctgccgcccatacccagtgagtaattggtgcataaaccacaagcacccaaattgcaatgaatgccatgaaagctgaatatttcatacgatcagcaatcgagccactcaaaattgcgacagtaatgatggcgaaagtcatttggaaaataacaaagaggctttcaggaattgtcccacttagtgcatcaaaagcgacgccattgagcattgctttagacaaatcaccaaagtatgcacccgtgccagagaacgcgattgaataacctgcaatcacccagagcaaacttactaaaattgcagcagaaaggctaaacatcatagtgcttaagacatttttcttacggaccataccaccgtaaaataacgccaagcctggaattgtcatcaacagaaccaaagctgttgaaattaaaatccaagatgtatcaccggtatcgagttttgcagtcggtgtcggagcggccggagtttcctcagctgctggtgccgctgcaattgttgcaggagcttcagacgttgatgttgctgtaacctcagatgttggtgttgttacagtctcttctgcccaagcggcagtaccacccaaaagtgcgccggttaaactcagcgccataagcatttttttcattcgtgtcccccaacctcatttgcgagctatttattgctcagcaagctttgtgccaatttagacagcatctggtcctgtttcacctgtacgaatacggatgacttgttccagattagtcacaaaaatcttaccgtcgccgatttttccagtgcttgccacacgtgtaattgactcaattaccgcgtcgaccatttcatcactaatcgcaatttcgatttttactttaggtaagaaatcaaccacatactcagcgccgcggtaaagttctgtatgtcctttttgacgaccaaaacctttaacttcagttacggtaatcccttgtacaccaatgtcagagagtgcttcacgcacatcatccaatttaaacggttttacaattgcagttacaagcttcatgtttgtttccttcggcttcttttcaccagtaaggttttatgttcaattttcatgccaatatttcaaaggttggaggatatgaatcttttgcatgagctttctttataacctatttagttatcaagatgtagatgagcaactaaaaataaaatgaattttcagtcctgtttttatttcaatttatcgttatgacatggctaaaagccaagaagcctatatcctagattcaagcagtgttaaactggcgagcataaggtaatacaacagtttggatatctcatgctagaaactctattacaggccatcttggaacaaattgacgagcctaaaaaagatttagaaaaaaacttacgtgcattattaaatgaaactgtcgagaaattagatcttgtctctaaacaagaaatcgaaagacaaaaaacagcccttcatttagccaatcaacgtttagaagcgctacaaaaacaagtcagtctattagaagaagctttaaagaataaaaaataagcaccaacgtagcgcacttatactttacaacgattaaaaatgaagcaccataatggaacaataagatgtctttttctaaaatttatactcggggacttttaggattacatgcgcctctcattgaggttgaggtgcatgtgagtcaaggcttaccctctctgactattgtaggcttagcggaagcagcagttagggaaagtaaggatagggttcgctcagctattattaacagtggatttcaatttccaactaagcggctgaccattaaccttgctcctgcagatttgcccaaagatggttcacggctagatttaccaattgctttaggcatcttaattgcctctggtcaacttccggaaaactgcacagaagactttgaatttattggagagttggctctagacggtcatgtaagacctgtgtcaggcgccttaactttagcaatggcatgccagcaagctcagcataaaatcgttttaccagtcgataatagccaagatattagccatttacctaatcttgagtgttatccggttaatcatttaaaagaggtgtgcgagcactttttaggcacacaaaagctagctcacgcacagccaagtgaccattcaaatgaaatgccctataaatttgatcttgcagatgttaaaggtcagctacgcccacggcgtgcactagaaattgctgccgctgggggccattccctgctctttaaaggaccaccaggcacaggtaaaactttattggcctcacgcctgccttccattttaccgccactttctactcaagaaactcttgaagttgcaagtatttattctatttcaaatacaccacatacttttgggcagcgtccatttcgcgcgccccaccatacagcatcagcaattgcactggttgggggcggttgtcagttccacaaataaatcagagtttacacaaataaactagagcaagaataaaaagtatattatctataagctttaatttttcattttgtaaaaatatatgcctgttaataatgataaaataacgactattgattgtttcccaaatgataatattagtcgagtggtttatcgatatggtggactcgttcgaaacgaagataacgactcaactaatccttttgttgaagtgttattaattgagattagaaaaagtgatcaatggttatttttagataagtgctcaacattccttgttcccgtacttgatcttgatgctgttcaacatggcagtatttgggacgggaatgttctgaccaattacacttatagattttcaggaaaactcatcacaaaacgattttctttcgacttcagcaataataaaccgaggaacataaaactttcagacaaaattccggatacgtcagagtactacattccattaaaaaactattttcttcccaataaagttgattatgttctacaaggctatccattcactaaatacaccaatgattcatatcggaaagtgaatcactgcttaatgcattctaatgatggaactcaagtcatcacttcctcaatccatattttgcatagcttattcgtcaatcggaaggatattcggggactcttattaagcacttcaggccaatctatcattaaccgctttttagaatcttatacaacagaagttgagaatgataatattgaatataaaataaaaatcagaaagccatatgaagatattggcgaaacagcaattatatttctggctaatctagccttaaatccatatgtgcagacgatagtcgataaaattcaacgaagtatggaagttactgagtttcatcatcttcagcatggcacaggcataagataccccattgtatatccgccacatcctacaaagctttttcttgaagcagaaggaatttggctagatgacaataagacacgtttttttattactagagtgaaaaaatttgatcctattaacgatcacatgattgatgtcaataaagaccttaccaatactgtttcaaaaactgatgaaaaaaaccctcgtcctcgtgaaaaaagtcaaaataaaaatgagcatatcaatacacaaaaaccaccatcaagaacaagcggtgaataccgtaagcgttctgatgtggaaactggaaatacacaaaatattttgaagtattcttttaatgaaccagccaatgacccaattgaagttggcacatccaatcatccatattcagataaatcagaggatgttgaaacatcatctgatgaaccatatggcaataaaaatactaaaactaaaaagtctgaaacaactgataatccgcctagcagagatgaacgctttgatattcaatatattattcaatcacttaaccatttaacactagatacaacctctccattagaacgtgtgtattcaattgatatattggggaatgagatacacggattcaacttacttcaaataaagaaactcgttcctcaaccaaagcatccatcttggattgatgcagaatttggaaggaaattgttatttttaaaactggaattgaaagatcagcatgatcaatattatttaattgatatacataaaaataaaagccatgaagcattctgtgcttttattatcgtgtcaccacataagttaacccgtgagcaaataaaaaatatatgtatagagcttgagaatgcaaaaggaattaaaaaatggacgctacgttgtgaaagttttaccaaaaaaattatttcgattaaacattcatctgctactcccgatgagtggaaaaatagatttaaaaatttattttcaacattaattaattgatttttattaaattacaaaaaactgtcgtactaaaaataagaaaggtacttcataaaggagttgcaagaatcctaacctttttttacaattcaatagttgttgaaatattgaaatattatttctaaagtaaccgtgcatcggaagttaatatttctagtattgtttcctgtcataagcatcaaggtcttagctaataatataaattagctcatttgatacttttcaaacttaatctccgtcgatataaatcaattaatatcaatatcttgaagataggaaatgcataatcagtgttcgtttcaagaatcattagcattattatttaaggtttagctatcctatgtacttatctgatttaaacgcacaacaaagggaacctccattgaatcgaactaatatttttttggtgaatcgcattctgactggttgcctgtcagaggcggagaatctggtgattttgtttttcgacgtggtgacgggcatgccttcgcgaaaatcgcacctgcttcccgccgcggtgagctcgctggagagcgtgaccgcctcatttggctcaaaggtcgaggtgtggcttgccccgaggtgatcaactggcaggaggaacaggagggtgcatgcttggtgataacggcaattccgggagtaccggcggctgatctgtctggagcggatttgctcaaagcgtggccgtcaatggggcagcaacttggcgctgttcacagcctatcggttgatcaatgtccgtttgagcgcaggctgtcgcgaatgttcggacgcgccgttgatgtggtgtcccgcaatgccgtcaatcccgacttcttaccggacgaggacaagagtacgccgcagctcgatcttttggctcgtgtcgaacgagagctaccggtgcggctcgaccaagagcgcaccgatatggttgtttgccatggtgatccctgcatgccgaacttcatggtggaccctaaaactcttcaatgcacgggtctgatcgaccttgggcggctcggaacagcagatcgctatgccgatttggcactcatgattgctaacgccgaagagaactgggcagcgccagatgaagcagagcgcgccttcgctgtcctattcaatgtattggggatcgaagcccccgaccgcgaacgccttgccttctatctgcgattggaccctctgacttggggttgatgttcatgccgcctgtttttcctgctcattggcacgtttcgcaacctgttctcattgcggacaccttttccagcctcgtttggaaagtttcattgccagacgggactcctgcaatcgtcaagggattgaaacctatagaagacattgctgatgaactgcgcggggccgactatctggtatggcgcaatgggaggggagcagtccggttgctcggtcgtgagaacaatctgatgttgctcgaatatgccggggagcgaatgctctctcacatcgttgccgagcacggcgactaccaggcgaccgaaattgcagcggaactaatggcgaagctgtatgccgcatctgaggaacccctgccttctgcccttctcccgatccgggatcgctttgcagctttgtttcagcgggcgcgcgatgatcaaaacgcaggttgtcaaactgactacgtccacgcggcgattatagccgatcaaatgatgagcaatgcctcggaactgcgtgggctacatggcgatctgcatcatgaaaacatcatgttctccagtcgcggctggctggtgatagatcccgtcggtctggtcggtgaagtgggctttggcgccgccaatatgttctacgatccggctgacagagacgacctttgtctcgatcctagacgcattgcacagatggcggacgcattctctcgtgcgctggacgtcgatccgcgtcgcctgctcgaccaggcgtacgcttatgggtgcctttccgcagcttggaacgcggatggagaagaggagcaacgcgatctagctatcgcggccgcgatcaagcaggtgcgacagacgtcatactagatatcaagcgacttctcctatcccctgggaacacatcaatcttaccggagaatatcgttggccaaagccttagcgtaggatttcgccctctcccgcaaacgaccccaggaggaaagggcatgaagaagccgaaccaagacgacgagccgtttttcatcaccgaggagattgcggccgaaatgatcgccggcggctatgagttcgagctgccgcccattccttgcaccatccgcctacgcgacgtgctggagcgcatgaccgatgctgagctagcattgcagccgggcgagatcgccgaccaggagcgtgaacgctgccggcgcaagccgtgttcaacctcatgatctggtcatggtatttttcatggcactgagcctgatagttcttgcaaattgttgtcactaaagggttttgtgtgcttgtttacaatcgagtgggagtgacgggcactggctggcaatgtctagcaacggcaggcatttcggctgagggtaaaagaactttccgctaagcgatagactgtatgtaaacacagtattgcaaggacgcggaacatgcctcatgtggcggccaggacggccagccgggatcgggatactggtcgttaccagagccaccgacccgagcaaacccttctctatcagatcgttgacgagtattacccggcattcgctgcgcttatggcagagcagggaaaggaattgccgggctatgtgcaacgggaatttgaagaatttctccaatgcgggcggctggagcatggctttctacgggttcgctgcgagtcttgccacgccgagcacctggtcgctttcagctgtaagcgtcgcggtttctgcccgagctgtggggcgcggcggatggccgaaagtgccgccttgctggttgatgaagtactgcctgaacaacccatgcgtcagtgggtgttgagcttcccgtttcagctgcgtttcctgtttgccagccggcccgagatcatggggtgggtgctgggcatcgtttaccgcgtcattgccacgcacctggtcaagaaagcgggccatacccaccaagtggccaagacgggcgcggtcaccctgatccagcgttttggatcggcgctcaatctgaatgttcacttccacatgctgtttctcgacggtgtgtatgtcgagcaatcccacggctcagcgcgtttccgctgggtcaaggcgccgaccagcccagagctcacccagctgacgcacaccatcgcccaccgggtgggtcgctatctggaacggcaaggcctgctggaacgggatgtcgaaaacagctatctggcctcggatgcggtggatgacgacccgatgacacccctgctggggcactcgatcacttaccgtatcgctgtcggttcacaggcggggcgaaaggtgttcactttgcaaactctgccgaccagtggtgatccgttcggtgacgggattggcaaggtagccgggtccagcctgcacgccggcgtggcggccagggccgatgaacgcaagaagctcgaacggctgtgccggtacatcagccgcccggcggtatccgagaagcggctgtcgttaacacgaggcggcaacgtgcgctaccagctcaagacgccgtaccgggacggcaccacgcacgtcattttcgaaccattggatttcattgcaaggctggccgccctggtaccgaagcccagagtcaacctaacccgcttccacggggtgttcgcacccaacagtcggcaccgggcgttggtcacgccggcaaaacggggcaggggcaacaaggtcagggtggctgatgaaccggcaacaccagcacaacggcgagcgtcgatgacatgggcgcaacggctcaagcgtgttttcaatatcgacatcgagacctgcagcggctgcggcggcgccatgaaagtcatcgcctgcattgaagaccctatagtgatcaagcagatccttgatcacctgaagcacaaagccgaaaccagcgggaccagggcgttacccgaaagccgggcgccaccggctgagctgctcctgggtctgtttgactgacgagcctgaaggccaacgataccaatcaaaatgctgcgttcacagcgccgcggcagggatccgccgtgctggttgtcggaaaaggagccgctagtgggaaagaggagggtaaattttcagcgttgctggctccccgtcagccggattgggttgcatcgcaggggtgtcgaaagagtcaactgcggtccaaagctgttggacttgggtgaaaagggcgtttattcttcctatacgttgatggggatctccttaaaccatggcgtacatgccaaagtttccacgccagtgcatttacgaaaagcacgtacttgctatgatcatttagctggcgaagttgccgttaagatctatgattccctttgtcaacagcaatggatcactgaaaatggttcaatgatcacattaagtggtattcaatattttcatgaaatgggaattgacgttccttccaaacattcacgtaaaatctgttgtgcgtgtttagattggagtgaacgccgtttccatttaggtgggtacgttggagccgcattattttcgctttatgaatctaaagggtggttaactcgacatcttggttaccgtgaagttaccatcacggaaaaaggttatgctgcttttaagacccactttcacatttaagttgtttttctaatccgcatatgatcaattcaaggccgaataagaaggctggctctgcaccttggtgatcaaataattcgatagcttgtcgtaataatggcggcatactatcagtagtaggtgtttccctttcttctttagcgacttgatgctcttgatcttccaatacgcaacctaaagtaaaatgccccacagcgctgagtgcatataatgcattctctagtgaaaaaccttgttggcataaaaaggctaattgattttcgagagtttcatactgtttttctgtaggccgtgtacctaaatgtacttttgctccatcgcgatgacttagtaaagcacatctaaaacttttagcgttattacgtaaaaaatcttgccagctttccccttctaaagggcaaaagtgagtatggtgcctatctaacatctcaatggctaaggcgtcgagcaaagcccgcttattttttacatgccaatacaatgtaggctgctctacacctagcttctgggcgagtttacgggttgttaaaccttcgattccgacctcattaagcagctctaatgcgctgttaatcactttacttttatctaatctagacatcattaattcctaatttttgttgacactctatcattgatagagttattttaccactccctatcagtgatagagaaaagtgaaatgaatagttcgacaaagatcgcattggtaattacgttactcgatgccatggggattggccttatcatgccagtcttgccaacgttattacgtgaatttattgcttcggaagatatcgctaaccactttggcgtattgcttgcactttatgcgttaatgcaggttatctttgctccttggcttggaaaaatgtctgaccgatttggtcggcgcccagtgctgttgttgtcattaataggcgcatcgctggattacttattgctggctttttcaagtgcgctttggatgctgtatttaggccgtttgctttcagggatcacaggagctactggggctgtcgcggcatcggtcattgccgataccacctcagcttctcaacgcgtgaagtggttcggttggttaggggcaagttttgggcttggtttaatagcggggcctattattggtggttttgcaggagagatttcaccgcatagtcccttttttatcgctgcgttgctaaatattgtcactttccttgtggttatgttttggttccgtgaaaccaaaaatacacgtgataatacagataccgaagtaggggttgagacgcaatcgaattcggtatacatcactttatttaaaacgatgcccattttgttgattatttatttttcagcgcaattgataggccaaattcccgcaacggtgtgggtgctatttaccgaaaatcgttttggatggaatagcatgatggttggcttttcattagcgggtcttggtcttttacactcagtattccaagcctttgtggcaggaagaatagccactaaatggggcgaaaaaacggcagtactgctcggatttattgcagatagtagtgcatttgcctttttagcgtttatatctgaaggttggttagttttccctgttttaattttattggctggtggtgggatcgctttacctgcattacagggagtgatgtctatccaaacaaagagtcatcagcaaggtgctttacagggattattggtgagccttaccaatgcaaccggtgttattggcccattactgtttgctgttatttataatcattcactaccaatttgggatggctggatttggattattggtttagcgttttactgtattattatcctgctatcgatgaccttcatgttaacccctcaagctcaggggagtaaacaggagacaagttgtcagttccacaaataaatcagagtttacacaaataaactagagcaagaataaaaagtatattatctatatgctttaatttttcattttgtaaaaatatatgcctgttaataatgacaaaataacgactattgattgcttcccaaacgataatattagtcgagtggtttatagatatggtggacttgttagaaacgaagataacgattcaactaatccttttgttgaagtgttattaattgagattagaaaaagtgatcaatggttatttttagataagtgctcaacattccttgttcccgtacttgatcttgatgctgttcaacatggcagtatttgggatggaaatgttttaaccgatcaatcctatcggttttcaggaaaactcattacaaaacgattttctttcgacttcaccaataataaacctaagaatataaaacttacggacagaatccccaatacttctgactactacattcctttaaaaaactatttcctcccaaataaagttgattatgttcttcaaggctatccatttaccaaatataccaatgattcatatcgcaaagtgaatcattgcctaatgcattccaatgatggaactcaagtcatcacatcatcaattcatgtattgcatagcttattcgtcaatcggaaggatattaggggacttttattaggaacttcgagtcaatccatcattaatcgttttttagaatcttatacaacagaaattgtggacgataatgttgaatataaaattaaaatcagaaagccatatgaagatataggcgagactgcaattatttttcttgctaatcttgccttaaacccatatgtgcaaacgatagttgataaaattcaacgaagtatggaaattaccgagtttaatcatcttcagcagggtacaggcaaaaggtatcccattgtgtttccaccacatcccacaaagcttttccttgaagcagaaggaatttggctagatgacaataagactcgtttttttatcactagagtgaaaaaatttgatcctattaacgatcacatgattgatgtcaacaaagacctgaccaatacaatttcaaagcctgatgagaaaaatcctagacctcgtgaaaaaagtcaaaataagaatgagcacatcaatactcaaaaaccaccatcaagaacaagcggtgaatatcgtaagcgttctgaggtggaaactggaaatacacaaggtattctgaagtattcttttaatgaaccaaccgatgatccaattgaagtcggagcatctaatcaaccttattcagataaatcagaagaggttgaaacatcttctgatgaaccctatggtaatcaaaatactaagatcaaaaaatctgaaacgacagatacaccacctagcagagatgaacgttttgacattcaatacattatccaatctctccaagaacttgcttctgaaatgggttctcctctggaacatctgtctgcaattaatgaacatggtgaaatgatagcgagtattaatttgcttcaaatcaaaaaacttgtgcctgaacccaagcatccctcatggattgattatgataaagggcgaaaattattgttcttaaaattagacttaaaagatcaaaatggattttcctatctcatcgatatacataaaaataaaaatcatgaagcattttgtgcctttcttatttttactcagaataagttaacaagcgaacaaattaaaaaaatctgtattgaactagaaaatgccaagggaataaaaaaatgggcactctactgtgatagtttcattcataaaatgattgcaataaaacatttatacgcaacaccagatgaatggaaaaatcgctttaaaaatttattcataagcttacagaaggacaaatcctaattaaagaatattttttatacaatcatatgttcatgaaattacttggtatttcatgttttctataaatttgcgaaataaaaaagagtgaaattttcgttcagttcgcctatactaacagttcaatttaaatttctattcgtattcacacacttatgcttttgactccaccctagtttatttacccatctttttgtaaataactcatcactgtctagtgatgtggtgtagtcgcttgtgtgttgtatatatcacatcactagcctttcctaaaatttaaaaaaataggctattttcatgttatccactattcgagaacaatggttctccaatattcgcggggatgttcttgcgggtattgttgttgctttggctctaattcctgaagcaattgctttctccattattgcaggcgttgatcctaaagtggggctatatgcttcattctgtattgctgttgtgattgcttttgtgggcggtcgtcctggtatgatttctgctgcaactggtgctatggctttattaatggtcacactggttaaagagcatggtctgcaatatttattagcagccacaattttgacaggatttattcaaatcctagcaggctatctaaaattaggagccttgatgcgttttgtatcaaagtcagtcgttattggctttgtaaatgccttggctattctaatttttatggctcaattgcctgaacttaccaacgtcacttggcatgtttatgcgatgacaatcggtggtttagcggttatttatctatttccctatatcccagtgatagggaaacttttaccctctcccctcatctgtattgtcctacttacgctctttgccttattcattggtttagatgtaagaactgtcggtgatatggggcaattgccggatacgcttccaattttcttgcttcctgatattcctttaaatcttgaaactttagctattattttaccctattcactaggtttggcagccgtgggtttacttgagtccatgatgaccgcaacaattgtcgacgatttaacagataccaccagtgataaaaaccgagaatgtaaagggcaaggtgttgccaatgtcgcttcaggcttcttaggcggaatggcaggctgtgccatgattggtcaatccattattaatgtgaaatctggtggacgtacccgtttatcatcatttagtgcaggggtctttctgttaattatggtggtgtttatcagtgactggcttaaagccattccaatggctgcactggttgctgtcatgattatggtatcaattggaacatttaactgggattctctacgcaatatccgccaatatcctctctctagcaatatcgtgatgatcgttacagtcgtcgtagttgttgccacacataacctggcttatggtgtattagtcggtgttcttctttctgcattattttttgccaataaaattgaacgctatatggcgattcaatctgtatttgatgaatcagaaagcacacgtacttatacggtaacaggtcaagtgttcttcagttcagcagataaatttacttctgcatttgatttcaaagaggcactttcaaaagtggtgattgatgtcagtcaggcacacttctgggatgtttctgcggttgctgccgtagataaagtggtcattaagtttagacgtgaaggaacagaagtcgaacttattggaatgaatgaagctagtaaaacattagtcgataagtttggtatccatgataagccagatgctttagatcgcttaaatagccactaagagggattagttatgtcaaaaattattgcatgtattgatggatcattagtaacaaatactgtgtgtgattatgcagcttggtttagcgataaacttaattcacctattaaactattgcatgtcattgataagccaaaagcaaaagcaccacaagatttaagtggtgcaattggtctaggaagtcgagaaaccttgctcaaagaattggttgaactcgaagaacgtaagggaaaaatcgagctagagcatggccagattcttcttcgggaagcaaagaactatttattggagaagttctctattgatgctcaaagttttcaacgccatggcagtgttttagaaacaatcatgggaatggaagacgacattagagttcttgttatgggtaagcatgggaatgaaaccgagcatgattccagtaaaattggaacccatattgaaaatgttgttcgtgcccttcataaacccgtattaataacgtctgcaccatttagtccacctaagtcttttttaattgcttttgatggaagtcagactgcaagaaaatgtgttgaacgcattgcgtcaagtccattacttaaaggtcttgcagtacatttggtttatgtcggaaatccgaatagtgaaatgcaaaatcagctctcttgggcaaaagagcaacttgaatcacaaggttttaatatcacctcgaatacgttggatggtgaagttgataaggcaattatcaattacgctgaacagcatcaaatcgatttgattgtggttggggcttatggtcattcaaagatacgtcaattttttattggcagcaccaccacaaaagtgatcacaagcgctaataaaccagtcctgttactacgataatttcatgaaggggtagaattttgatctatccctttatttttaataagttataaaaggaatcataaatatgaatacgatgttaataagcccaactctaaatgtttcttgttccgaaaatgtgctgttaaaaatatcctcatactttggtgtatctcatgaacaagcttatcgaaaaggcgtagattctcttttaaaattaacagagatggttatagcaaataatgaacattctgaaattattaaactttttttgtgtgattgtcatttaagaacatctatcaatttagatgatatatccgatatgcctactcaattgataggcgattgccttaatgtgattgttctacgttatgcatttgtagtttgacaatcaggtcgtaaactagacattaatgttctaaacttaaacaatatatttgtaaaccaaaaggttgaataaatgggacaagctaaacaaaggggtacacttgagcaaagagtaaagcaagctcaagaacaaaaagatgatttttatggaactgaaagaagtgtagcagaagttctagctgaactaggcttaccaaaagaaagtacagtaaaaggttatgttatccatctacctgaaaaagatgaatttgtagctgcaattaatgacaataatatttctttttcagttgcttatgctcggacacctgaattagcgatgatatatgatgaaccacaaaaagcgatttcagacgctaaaaagatttcaaaacataagctattggtttgtgttttatttgaaacttcaaaccaatacatgattaatgatatttgggctaattattagtctgagtttaaatctattatgtcaaaaattgcatatagttctaaacttatgtttgattgagtttagaactataatgtaaatctattcaattgtttttgttataagttattgattttcatctttatgagtttaaaactttattgtgtaaacacagcatttaaagcttcattaggtgactttttaggtggtggtgataacttaattaacacatggaaatctactctataaaggtctcacatactactatctcagaattttcagcgcgtcttttaatatttcattaatgatcggtgtgacaattactaaaataatctgctgaaatctcaataataatgatcagctaactcgctgatcattattttaagtgcttcaacttattgtgtttttggcaaccaataatattgcccattaagcacaacagtaaaaccatcctcaatctcagtaatcatttccgttttaatctttagagcatctatgtaaggaagttgatgaaaatacctaagcccatttctgacccaacttaagataagttcactgtcatttaaatcagtttgggtaagtgcaataagttccatttctagttttttcttttgtttagtctttaaaaaatcagatttttttaattttaaataatcaatggaagcaccgtaattctcatttaaaaagttaatgaatccagtgagcgccgcagcttgaccagaatattcagcaagatacgctttgacatgctccaaatttggtaattgagcactttctccctccattgacagcatcaacgccacagcaggctttacagccaacctcgctgaacgtattgaagtctcacctcgtttgattttttcttctaatttatttttgtattccagtacaacatcataagccaaagatggttgcaaaatacgttgcacaagcttttccatctgatctcgttctgaacaactttttttgttatccatatctattcgaatgtcatgcacctcttcaagccattgcatcaccaattcaaattttctaagcccactacttcgtaaccttactaataactgctttggagtaggcacagattgattccaatctatttcggttttaataaagaaatgggtatgtttatttatatataatgcagctttatgtgatccaactttcttttctaaccagcctatatagttttcatactgctgttttaagtcactagactcaaatactttctgattttgatcaaatttattccataaattttgatgccaataacaatcatcgcataaatcagcacaacctgctgcaatcatacaatgacatgctttacaggatttctgaggcttatctctacattttttacacgttctttgtcctgatacatcagactccaataagcgatgtttctggcatgatgggcatgtctcataatctcgtgtcgcacattttggacatacccgtagatcatcattaaatcgtgaaattcgggtcaatttttgtgatggcgtaccacatcgttcacaaggctcaatgggtctaaaatacacggaacaactattacacaccacaccatattcggtcagcttacctattggtttatttgtctgattacatcgaatacagggttgtttctttatacattcattgcaaatggcttgttcatcatctctagggagtcgggcaaagtcaccacaacttgggcataatcgctttttaaagatacgggcataacaagtcgaacaatatttcttgcctttatatcgtttttttataaaagaaacagactggttgcatccatgacagtcatgttcaataacattttcagtcaatatgcatcgctccactattattgcttcttcttaataaatttaaccattgacgttgtacagtcgctttagattttggcttagtaacagttattgctgcacgagagacaggataacgtcttgtaggcttaatcattaaatctttcatctgttgaagctgaacaggcaacttcttgcgcttgtcccaaaaatttgcacgacttactccatattcctttgatcgttgtaccaataagtcacatggaatatccataatctgatccaacattgaaagcaaaactattcgttcctgagtactcagatattcaaatgctaatggggtaactggatgtgaaagatgtaaatttacgtcaaaactttcaaataattgaatcacatttttattgggcgtattgaccaaaaatctaatctcactgagccatgaacgagcaatttcaaaccatacttgagtagtcactggggattgattataaaaaccaattttttgttttaagacttgctctgctttattttggaagtttaaagcatttaaattgatgtttttgctttcctcacaacgccttaaatcaaagccacatgtcgtacagatcgctaaacaaccatgttccatatcggctttaaatggttggatcgtcacaccacattcagggcaatggtcaattaaacttaactgatgctcaacacaactacaatgccacccaatacgccacattaagcgcaaataaggcggattttcatgactcttcaggcattcaacacatacttgccgacctgatgtatttgagcggtttcgtgtgcccaaggataaaacccaagggatattttgatttgaatcataatttggctgtatctgagaaacgacgctactcaacatcgattgctgtatcttctgttttgactccatactatgagataacagagcatcgaatctttcggcatctactcctttgtctaaatcaatcgttaaagctctccatttcccccataaagcctcaatgagaaccataggtgagcaacctacatctaaggctgaacggatcaaccaagatgaaaatatttccccttgctgaatgggagttctgatataccaacattgttcaggttgactcatctctacctccctataatgatttcgcaaaattaactcaggctgagatttatatttctaatatttcttaaaccctccgtaggtttaagccatttaaacttatgtacgatgtcataggtaatttcttcatcaccttgtaaaatggcttctttggcacactccaccagtaatcgatttaaatcccctaaatttccacctgacacttcaaaaatcaacgtagcaatctctttggatgcaagattagactgtttttttaacggcaatagtcgaacatagctgactaataatcttaaaaaatcttgattgagttcccatttaggtaaattcaccacatcaaagcgactggcatattgcggatcagtatgcagtatggtgattgcctcacgagtaccaacacctacgatattcagactcaattcattgctgaggttcttgagcgtattcatgacttcgggaagcaatttggctgaacctgtcagacaattatgaatttcatcgataatcaacatttttgtttcatacttacgcatcaagtgtacggcttgatttcgtaatttggcttcaggatcacttgcccgaaatggcacaaagaagtgatttaaaatattaatatagagttctttaacattggcttttgctggagcaagtatcggtaaaactggcttagttacggacaataaatccatgtcagcatcacttacggtttttgtataatactgtctagcaaactcatgaatgatagttgttttgcccatattggagtcaccaacaatcaacaagcattcaggtcttaatttcctagggcgattcaaaatatcggtcaatgtgttcatgatggtaatggctttcttatagccaatccatctatcagtaaataatgtctcaatccgttcactatcgcttaattgcatgatttcaagtacatgctctgcaagatgttcatatttttccattgcatcaccttaaatcgtcaaatgcagttaaaggagtactccacaaatcatcacttgtctgaagactttcagaaactacagcctttttagactgattctgttcggaaagctgagtaatggcttttgcattttccttttttctttggtttgagcgacgttgctttcgagtcaagcttctagcctgattaagttgatcacgtagatgcaaaatcgccttgtaaatctcatcctgattctgaacatcctgacgttcacttttgagatagttctgaacctgcttatattcaaataagctaatcggtggtatctctcgctttgcggtaggtactttaaaataggtattagaatatggctcataaaaccaaatctgtgaaatatccctcggatcacgtttaaacaagaattttcttttgcgctttcgattattgtcctctggatcaatagaattaacccattgtcttaaacagtcggcaaaatagaataagttatctttttgcacccctgtacgctgaatagtcgcttcaaattcaggtagaaaatcaataaacaaggtatcttcatctgatacacgttctttcaaacctgtacctgctgtcgtcttcgtcccccaaacaccttcttcccatttaacgattggggatgttcctaaagcggaatgtttcttctggtgataaactttagtaatccaatacacgatatagtattcaagctcttttaatgtcatacaggcttgtttagcggaatcataagtcccacgctgctgtacatttgaaaaagttgtaccatccaagacatgcatttcaagattgacgataccaagcatacgctcgatatgaccgccaaatcttgccccaccaattggtcggtattcccaatgaatcccatactttagacaagctttactgatgtgattggttctaaaatcggggccattatctgtatgcaccgagtccataatcccttcgacctgccattcagcatcaatatcgagttcgatcaacttacgtttttttgacaaaatacaagatgcgatacacatcgccactgaagtcgtacttggcgcttctagtgataggtaataccctacgatcatccgactgaaaacatcgattgccaaggttaaatgaggttttccaatcgcttctctaaactcgtcatccacgatttcaatatctagaggtgtatgatcaatctgcacatatgccaaagggtaatcagcatttggaaatgaaccagcagcagccttaaatttatctattgcagctttagatccaagacgtgctttcgttacttggtaatcatttaaagcctcgattcttctacgaatagagttttcatgcggtgcttcaagctgaagccgagaacactctgcttttacaatttcaatcgttttggaaatactgggtttcttcgcattcaaatattcatcattgatagcttgtttaatgatattgctcacttgaggtgacaaccttgatttttcagttgtccaacctcgttttttgggaatcaatgccattagagaattattttcccgataatctttaagccatttccacaatgttgagcgattcacatcatattcattcgccctattttcgaccagttcagtcgttgaatactcaatcaaaggcttaataatctcataacgttgtaaagcaatctgccaagcttcattactaatatcctgatcacccttattcaaacgctcagttagcgtatttcccccattaaaaatggtcaaacttctagcattgacctgtagactacgtaccgaatcaagacttgatataacaatgtcattggcatttaaaacattcacaattttatagggttgcccctcataaccgacaaccacattgggttttagaatgatacgactacgatcgatattgacagcattagattcaatcatttagatattcctcgcaaatgcatcattttggttcacccatatcactgtttcagccgttaaagggcaatacaagtcacaagcaatcatgcgctttgccactaatgcccaaacttggtgaattccttttaaaacattggttttatctttaaaaatatgggcaggtaattgattaattgttgattgacctaactcttgtagggtatcgagtaatagttgttgatcaacggcacctacatgagagcgtctaaatttttttaagaaattaatattttcccaatactgatcatataatcttgtttcactgataattttgaacttccatcctttatcagcagcaaaacgatgggctgctctgaattttggttttaacttatcccagtcctcaacaagctttttcttaggcttaatttcgatgagcattggtacaggaaaatcctcaaaatcatcacaattcgagcttgaaaactgcactaaaaagtcaggagtgtaggttgattggttacccaattcagtgatgtaggggataactacaggttgaccgataacatcaatcacattgttattaaattcttgcttaagtatgaaatcacgctcaagggtcgattcaaaccaaatggttttctcacctctaaaggcataatttcccgaaatactcccataaacagtttgagcttttctaacaggtaagtattcgtcactcaattttttcataaaaaagtcaccattcaggcactcgtgcctattaatgtaattttgcaagtcactcttatctatttatgtaaataatctaatttaattgtgtgaaattagagtgacaacctattgattatctataatgccactctattctattgctgtaaatgacacaagtgcttagttatttcgtcaccaaatgatgttattccgcgaaatataatgaccctcttgataacccaagagggcattttttacgataaagaagatttagcacagcgccgcggcagggatccgccgtgctggttgtcggaaaaggagccgctagtgggaaagaggagggtaaattttcagcgttgctggctccccgtcagccggattgggttgcatcgcaggggtgtcgaaagagtcaactgcggtccaaagctgttggacttgggtgaaaagggcgtttattcttcctatacgttgtcggcagcgggccaaaaaggaatacgtccatgcccatcgaggtgaaaccggctgtgagcgcgggttcaagcatatagcccgacaggcgcgtatccttgccgatcacgacacgatggcggtggtcaccgcgacgaaagacacggccagccgccatgccgacgcgcaaggcggtttccgccgtcatcgcgccttcgttggctttgccacgaataccgtctgtgccgaaatatttgcgcaccataaggtcgattatcctgtcgtcgggtcgccctcaaaggggacatgcctgctgaaccgcgaatatagagaaatatcccgaatgtgcagttaacgaattcttgcggtttctttcagcgccgccaataccgccagcccgtcgcgcaaggggcgcggctcgtgtgtgcggatgaagtcagctccacctgcggcggcggcaagctctgcagcgagtgtcgcggccccgacatcccccggaccacggcctgtgagcgcgcgcagaaaggatttgcgcgaaacagacagaagcaccggcaaatcgaagcgcagccgcaattcatcgaaccgcgccagcaccgagagcgaggtttcgggagcagcccccagaaaaaaccccatgccgggatcaaggacaaggcggttgcgtttgataccggcacccgtcagcgccgcgatgcgcgcgtcaaagaacgccgcaatgtgatccatgatgtcgccagcgggtgcctcgcgccgatctgcctgcccgtcttgcaccgaatgcataacgacgagtttggcagatgatttcgccaattgcggatagaacgcagcgtctggaaaaccgcgaatatcattgagataggccacaccacgcgacaaggcataggcttgcgtcgcgggttgataactgtcgagcgagacgggaatgccatctgccttgagcgcgtccagcaccggcgcgatacgcgcgatttctgtgtcggacgaaacaggcgcggcgtcgggattgctggatgccggaccgaggtcgatcacatctgccccctcggccatcagcttacgcgcctgcgcaatggctgcgtctggcgccagataccggcctccatcggagaaactgtccgaggttatgttgacgatgccgaaaatgatgagcgatttattcatgggggcttctataataataatctctgtacacgataaaaatagataactcattgaaataatgtcataataattgttttctaacgacgaatactatgacacatctcaatgagttatatcttatcttaaacaaatatctaaaatggaacaagtcacatttaaagtgctttgcgctcatcatgcttgtgattattttaaagcaaacatgtaatctttcttctgcatctaaagccttgcccatcaagtgcttaccacaatcattttatcgacgtatgcagcgcttctttgcaggtcagtattttgattatcgtcaaatttctcagttgattttcaatatgttttcattcgaccaagtgcaactgactttagatagaaccaattggaaatggggaaaacgaaatattaatatcctgatgctcgcaatcgtttatcgtggaatagcgatacctatcctttggacattgcttaataaacgtggaaattcagatacgaaagagcgtattgctttgattcaacgctttatagccatttttggtaaagaccgtattgtgaatgtgttcgcagacagagagtttatcggtgagcagtggtttacatggttaattgaacaagacatcaacttctgcattcgtgttaaaaaaacttcattgtcaccaatcatttaggaaagaatcataaaattagtgatttatttcgccatcttaaagttggtcaaattgaatgtcgtaaacgacggattttggttggtcgggtgaaactatatataagtgcactacagttagaaaatggagagcttttactcgtcgtttctcctcagtttaatgccaatgctattcaggattatgcattacgctgggaaattgaaaccttattcagttgtctcaaaggacgcgggtttaatcttgaaaatacgcgcttgacagaccctagacgagtgaaaaaattgattgcggtgttagctataagcttctgttggtgttacttaacgggtgaatggcaacatgatcaaaaaaaagcgataaaaataaagaagcatggacgactctcaatgagtttatttcgctatggtttagactatgttcaaatggcgattcagcgtttaattggttttgggaaaaaagaagagtttaaggaaattttggcaattttaagaaggcagaaccctgataggataagggttctgtgaaatttgtcgtgtacagagaataataataatcgagcatgagtctcatacggatgctcgggtcgaaagggaatccccaggcgagtaacctgtttgcggtgatccattagctgcaggagcagaagagcatacatctggaagcaaagccaggaaagcggcctatggagctgtgcggcagcgctcagtaggcaatttttcaaaatattgttaagccttttctgagcatggtatttttcatggtattaccaattagcaggaaaataagccattgaatataaaagataaaaatgtcttgtttacaatagagtgggctttcttatagccaatccaccgatcagtgaataatgtctcaatccgttcactatcgcttaattgcatgatttcaagtacatgctctgcaagatattcatatttttccatcacatcaccttaaatcatcaaatgcagttaaaggagtactccacaaatcatcacttgtctgaaggctttcagaaactacagcctttttagactgattctgttcggatagctgagtaatggctttttcattttccttttttctttggtttgagcgacgttgctttcgagtcaagcttcgagcctgattaagctgctcacgtagatgtaaaatcgccttgtaaatctcatcctgattctgaacatcctgacgcccattcttgagatagttctgtacctgtctatattcaaataagctaatcggtggtatctctcgctttgcagtgggtactttaaaataggtattagaaaatggctcataaaaccaaatctgtgaaatatccctcggatcacgcttaaataagaattttcttttgcgctttcgattattgtcgtctggatcaatagaattaacccattgccttaaacagtctgcaaaatagaataagttatctttctgcacccctgtacgctgaatggtcgcttcaaattcaggtagaaaatcaataaacaaggtatcttcatctgatacacgttctttcaaacctgttcctgctgtcgtcttcgttccccaaacaccttcttcccatttaacaataggtgatgttcctaaagctgaatgcttcttctgatgataaactttagtaatccaataaacgatatagtattcaagttcctttaatgtcatacaggcttgtttagcggaatcataagttcctcgctgctgcacatttgaaaaagttgtaccatccagcacatgcatttcaagattgacaataccaagcatacgttcaatatgaccgccaaatctcgccccaccaattggtctatattcccaatgaatcccatattttaggcaagctttactgatgtgattggttctaaaatcgggtccattatctgtatgcaccgagtccataataccttcgacctgccattcagcatcaatatttagttcgatcaacttacgtttttttgacaaaatacaagatgctatacacatcgccactgaagtcgtacttggtgcttctagtgataggtaatatccaacaatcatccgactgaaaacatcgattgccaaggttaagtgaggttttccaatcgcttctctgaactcgtcatccacgatttcaatatctagaggtgtatgatcaatctgcacatatgccaaagggtaatcagcatttgggaatgaacccgcagcagccttaaatttatctattgcagctttagatccaagacgtgctttcgttacttggtaattatttaaagcctcgattcttctacgaatagagttttcatgtggtgcttcaagctgaagccgtgaacactctgcttttacaatttcaatcgttttggaaatactaggtttcttcgcattcaaatattcatcattgatagcttgtttaatgatattgctcacttgaggtgacaaccttgatttttcagttgtccaacctcgttttttgggaatcaacgtcattagagagttattttcacgataatctctaagccacttccacaatgtagaacgatttacatcatattcattcgctctattttcaaccagttcagtggttgaatactcaatcaaaggcttaataatctcataacgttgtaaagcaatctgccaagcttcattgctgatatccttatcacctttgtttaggttttcagttagcgtattttctccctcaaaaacggtcaaacttttagaattgacctgtaaactacgtaccgaatcaagacttgatataacaatgtcattagcatttaaaacattcacaattttataagggtttccctcataaccaacaaccacattgggtttaagtgtgatacgactacgatcaatactgacagcattagattcaatcatttagatattcctcacaaacgcatcattttggttaacccatatcacagtttcagccgttaaagggcaatacaagtcacaagcaatcattcgctttgccactagtgcccaaacttggtgaatcccttttagaacattggttttatctttaaaaagatgagcaggtaattgattaattgttgattgacctaacttttgtagggtatcgagtaataattgttgatcaacggcatctatatgagagcgtctaaatttttttaagaaattaatattttcccaatactgatcatataatcttgtttcactgataattttgaacttccatcctttatcagcagcaaaacgatgagctgctctaaattttggttttaacttatcccagtcctcagcaagctttttcttgggcttaatttcaataagcataggtacagggaaatcctcaaaatcatcacaattcgagcttgaaaactgcaccaaaaagtcaggggtgtagtttgattgattacccaattcagtgatgtaggggataactacaggttgaccgataacatcaatcacattgttattaaattcttgcttaagtatgaaatcacgctcaagggtcgattcaaaccatatggttttttcacctctaaaagcataatttcctgaaatactcccataaacagtttgagcttttctaacaggtaagtattcgtcactcaattttttcataaaaaattcaccattcaggcactcgtgcttattaatgtaattttgtaagccactcttatctatttgtataaataatctgatttaattgtgtgaaattagagtgacaacctattgattatctataatgccactctattctattgctgtaaatgacaattctgattcggaggtgcctgagtcaaaacaagcagtaatgaaaagacttgtggagataagaatacataactttgaatatttcatagtttagtcctagatatgacaattaaattagagcatgttcttttatttagaatcatgcatttattaaaaaattatttgcactcattaagagattttaagaaaagattaattacttcatctatagtgttaaatttatgctccgatttgaatttttctattaccacaattgtttttagtaaaagattaattgcttcatcatttgagctcaatttatgctctgatttaaatttttctattacctctaaactttcttttgataaccaaagatccttacgcgtgaaccctttttttaacatttcttggcgttgttttgctttacgctctgctgctgtgcttgccataatctacctgaaataatgttaataactttggccaaaaggatgtggagtagcgatcagaacaattcagctaatgaacgtgcgtgattttcatgtgacattctattagttgcaattagatcatcaacttctttttccgaatttgcgtaatactcgcgataagacaccactttgcctttgcagtattccttcacctcagactcggttttatacaatgttacatgcggtgtcataccataacgttcaaattggtcaatactgtcccaaaaaccacacacataaaaagcgaaagcgggagtgtcatcacctacatgaattcttttattcgtggttactatagaatttacatctgccttaacaacttttacgccgttagcttgaacaatataactattactaactgaatttttcattaatctaagtctcctaatgatattaagtttttatttattccggaattaaaatgccacttcttcccagtagatctctaactggcgaactgtcttaacatttccaaagtcacaaccttcatgtccgataatgacacgaggctcaacttcctcatcatagatttcaattatgcttcccaaaaaaatacctttcggaagtatgatgttatgtctctgaagcaatgtggccaatgttgaaacaggcgtcaaataattcaaaattgattttttagttttaatagttgtttgaaaaagtacctcatgctcaatttcttcaaacaattcaacgttctcaacagttaatttatatgctttaacttcattcatttttaacctcagctcataggcattattgtacatattgttattataaattttatattgtgaccgctcacaaagcaagaactatttttaatcaatgttaagtatctagtctgctttaagttgtttcaaactaagaaatctactccatttaacataattatgaaactttatccttatctagttcttacttattgtgaaaatttaactttttagttctcaccttcagtattttttacggctcttggatgtgtatccatataaacatttgtcattgaagtatggtccagatctgtatagatctgagtagtattcaaattactatggcccagcatttcctgaatttcacgaatacctacagaattatttattagatgagttgcaaatgaatggcgtaacatgtgtgggttggattgaattggataaccagcaagtttaaaagcatttttaattcttttatttatttggactcttgatagttgagctccagttgtggtgacaaaaacataattatgtttttgattggtatctttattcataatttcttctcttaaaggcaaccattctagatacgcttcaatagcttttgaacccaaaggtataatacgagttttatttccttttcctgtaactcttacttgtttgcgttttacctctacattttctatttgtaatgagtgtatttcttcaagtcttaaaccacatgagtatgctatttcaattagtgctaagtctcttttaaaaataactgtgcttgatggtcgttcaaattctaaattcttatttgaatctaatacttcatttattactgtgacttcatgaaatttaggtaaaactttactactttttttaattttaatatcttctgctggattgaaattaattaatttttctttagttaaataatggaaaaatgttcttatagcagagatatttttttttagtgtagaaactcctactccattttgagctctataagctataaatgttctaatatctgatgcttcgatttcctctaatgctaaattggtatattcaaagaatagatttaaactatttttaagcgtgtatattgtttcattagatttatttgctaataaatattcatctaaccatttttttagaagtatttctctgtctagcattaataaatcctattaacaaactgtaatgatattatatacgtttaaacaaaataagtggtaaaatatagctatcgcaagacctgtccttatggtggtgcttatgaatagcaaattttctgttgatcaatcgaacaagatttctcttaaagcagtgcttgaagatcttggtgatcaaatgtttgaagcaaataaatgtcctgatactcatcctgtctatgatcagttgcgtgagcgtttacgtaaagatcgtcaacttctagatgccttagatgctcaagatgagaacgcaaatactgaagaacgttctaggagtttggatataaattaaatgacacaaaaaaatgaactagacaccaagtatgcagtgatagttgctggtggtaatggagctggtaaatccactctgatagacaatgtgataattccaaaatttaatagtttaaatcttgatataaattttattaatgctgatgtttggcaattacaacactttggtcattttgataataccaatcctacccatgcacgcgaagctcagaaatgggctgaagctgaacgtcaaaaacatttagatgaaggacgttcttttattgctgaaacagttttttcgcatccttctaaagttgatctcatcaaggaagctaagagtaagggattttacgtagtcctgtatcacatccatttagaaaactcagatatcgcacttgatcgtattaaagatcgagttcgtaaaggtggtcatgatgttgatgaggataaggtaaaagctagatatgagcgtgtactacccttagttgctgaagctactcaatatgcagatttgacttttgtacttgataacagcgtgagagataggcctcatcagcaagtatttaaattagagtacgggaaaattactgcgattgacaacaatgttccggattgggccattaaagcttatgagaagcagctcactgattatcttggattggatcaagcaaccaaaatttcaaatactaatgaagatttaactatgtcaaatactaaagagaaacttggattcgagtataacgctagactgctggctaatgatattcaacctcaacatcgagaaacagttgttgctaattatcgaaagaattttgttgaacatgtagcgaactctgctgcggtagctggtaattcacataagcttgatgatgtagcatctttaataaatggcaccactgtaggtggacacagtgttaaggaccagcgacaagtattaaatttaattgatgcgtcaaatgaactggtaaatatggttcgtaatggaaattttgcattaaataaatctacatatttaaaagtcaatggaattgttgcagatcgtgaatcgattgaagctggtgttctacgtggcgaaggagttgaacaatcatttactccggatgtaggaattagacactttagaacccatcgaccgatgaaaactgaagaagatgctccggcgttaaataaattcatgcaagaagggtttgatcatatcaactcactcaagaacccactagaaaaaggtattgctacattcctttatggaagcctcaaccaattcacatttgaaggtgagaaaagaacagctcaccttatgatgaatggagtattgatgagtgctggtttagatgctattagcataccggctgataaggcaattgacttccgtcaaaaaatggttcgtttctatgaatcaaaaaatgcggatgaagtgatggagtttttagctgacttgcatccggctctcaataatacgaaaaaattagatgcagaaaaggaaaagaaatcagaaaatgactttggccgcagctttcagtaattttcgtttatccttttaatatcaatacgagagacactataattatagtgtctcttttttaatttaaagtattttgtattatttatggccagccttaattctgagttccagatccctttaaaagtggttacaacgcgcttaaatcacatgaaaattaatttgccgcaattggtaaagaaaattgaaaagagagcgattgaaaacttaaaaagacgtaaagataagaaagaacaaattgatctactgataacttgggatgattggatttatgccgcgcttgatgctgatcatgaacgtatacatggaagcgcggatcctcacccacttccaccaacattcaaaaataatatggttagtggtgtatatgaaaaagctttaaaaaatgtcatggggcatttcggagttaaagctactgttccagcatgggcggcaaatataaaggttggtgagcatattccaaaggaattgcttgatcgtctgcctgtgaccactggagagcttgtaactctaggaaattggatgctcacaaaaaatatataccggttcgaagacatagtaattaatgagttaattaagaccggctttaatggggttataccaaaccatattttgaaccttcccgatttgtgtgtatacattcagactgataatgctaagggtcttacattcgaaaatagacaagttgtgggtgttctattctgtgtaactgagctttgtggcgaccgccttttagtttcaacaatgtaccttgatgatggtatgccacgcacaattgcaattatgttgaatgaggaccaagatattgaagcaagcctcacaaattttgtggaccaatttcaacaagactatgatccagaaacaatggcttcagatctgaaagaaagacttaaaatacagaaaaaattaatcaatcttgttttatggtttagtcaatcaaaacctgaagtgactcctttaactccagataccaataagccggtacaatttgttgagattaagaaggaaaagcgtttatttgaagctggcaaatataagacttttaaaattggatctgaaacagctaggaaattaactaaattatacgaagaaattgaagtggccaaagctgaaggaaaagcatctggtagagagccacatttaagaaaatcacattggcacctttactggtatggtaagaaaggtcgttatgaacgttatgattttttattaattcctgtcacaattgttggcggcgtttcaaaagattaaactttataagtagagaaaaaatggataattcagaatctaaaattttagctgaatacgagaaagcgaagaagtgggataaatacgaaaaagtattttctattcttggagtactttctttgtttatatttatggttatgatcataatttcagcaattactttgagtttaaatgatacttcaccaactaaaatatttaattcttattgttgggctgcaatattatttttggcagttttattcacctcactaagaaatattgctgagcagatttcttttaagaaatctatggaaatcttaatagactcaaaagatgctgaagatgaaaaagatcaattggcagtagtaagaaggcagcatacaattatttgcataactgcattttgtgcattaatagttgcggattttattttattctactttattgcttttaatctcacccttcccctaaatatactgattcataaacccttatttattattatgctggcttgtttaatattttttactattaattatttgatttataaatataagtttaataaattaaacaacgaagcaatggttgcattcggtaagcaccttgataataaaagaaagaaataatataagaaaaggctcattatgatgagccttttttctaatctttagttttattaacgatgccattgcagcatttacatgtatagatatattcagtaggatccaaaagaattttaataaaaatactatttaaaaagttatagattatgaacctaacaattccgagacacgccaaaaagctagaactattgtcagttccacaaataaatcagagtttacacaaataaactagagcaagaataaaaagtatattatctatatgctttaatttttcattttgtaaaaatatatgcctgttaataatgacaaaataacgactattgattgcttcccaaacgataatattagtcgagtggtttatagatatggtggacttgttagaaacgaagataacgattcaactaatccttttgttgaagtgttattaattgagattagaaaaagtgatcaatggttatttttagataagtgctcaacattccttgttcccgtacttgatcttgatgctgttcaacatggcagtatttgggatggaaatgttttaaccgatcaatcctatcggttttcaggaaaactcattacaaaacgattttctttcgacttcaccaataataaacctaagaatataaaacttacggacagaatccccaatacttctgactactacattcctttaaaaaactatttcctcccaaataaagttgattatgttcttcaaggctatccatttaccaaatataccaatgattcatatcgcaaagtgaatcattgcctaatgcattccaatgatggaactcaagtcatcacatcatcaattcatgtattgcatagcttattcgtcaatcggaaggatattaggggacttttattaggaacttcgagtcaatccatcattaatcgttttttagaatcttatacaacagaaattgtggacgataatgttgaatataaaattaaaatcagaaagccatatgaagatataggcgagactgcaattatttttcttgctaatcttgccttaaacccatatgtgcaaacgatagttgataaaattcaacgaagtatggaaattaccgagtttaatcatcttcagcagggtacaggcaaaaggtatcccattgtgtttccaccacatcccacaaagcttttccttgaagcagaaggaatttggctagatgacaataagactcgtttttttatcactagagtgaaaaaatttgatcctattaacgatcacatgattgatgtcaacaaagacctgaccaatacaatttcaaagcctgatgagaaaaatcctagacctcgtgaaaaaagtcaaaataagaatgagcacatcaatactcaaaaaccaccatcaagaacaagcggtgaatatcgtaagcgttctgaggtggaaactggaaatacacaaggtattctgaagtattcttttaatgaaccaaccgatgatccaattgaagtcggagcatctaatcaaccttattcagataaatcagaagaggttgaaacatcttctgatgaaccctatggtaatcaaaatactaagatcaaaaaatctgaaacgacagatacaccacctagcagagatgaacgttttgacattcaatacattatccaatctctccaagaacttgcttctgaaatgggttctcctctggaacatctgtctgcaattaatgaacatggtgaaatgatagcgagtattaatttgcttcaaatcaaaaaacttgtgcctgaacccaagcatccctcatggattgattatgataaagggcgaaaattattgttcttaaaattagacttaaaagatcaaaatggattttcctatctcatcgatatacataaaaataaaaatcatgaagcattttgtgcctttcttatttttactcagaataagttaacaagcgaacaaattaaaaaaatctgtattgaactagaaaatgccaagggaataaaaaaatgggcactctactgtgatagtttcattcataaaatgattgcaataaaacatttatacgcaacaccagatgaatggaaaaatcgctttaaaaatttattcataagcttacagaaggacaaatcctaattaaagaatattttttatacaatcatatgttcatgaaattacttggtatttcatgttttctataaatttgcgaaataaaaaagagtgaaattttcgttcagttcgcctatactaacagttcaatttaaatttctattcgtattcacacacttatgcttttgactccaccctagtttatttacccatctttttgtaaataactcatcactgtctagtgatgtggtgtagtcgcttgtgtgttgtatatatcacatcactagcctttcctaaaatttaaaaaaataggctattttcatgttatccactattcgagaacaatggttctccaatattcgcggggatgttcttgcgggtattgttgttgctttggctctaattcctgaagcaattgctttctccattattgcaggcgttgatcctaaagtggggctatatgcttcattctgtattgctgttgtgattgcttttgtgggcggtcgtcctggtatgatttctgctgcaactggtgctatggctttattaatggtcacactggttaaagagcatggtctgcaatatttattagcagccacaattttgacaggatttattcaaatcctagcaggctatctaaaattaggagccttgatgcgttttgtatcaaagtcagtcgttattggctttgtaaatgccttggctattctaatttttatggctcaattgcctgaacttaccaacgtcacttggcatgtttatgcgatgacaatcggtggtttagcggttatttatctatttccctatatcccagtgatagggaaacttttaccctctcccctcatctgtattgtcctacttacgctctttgccttattcattggtttagatgtaagaactgtcggtgatatggggcaattgccggatacgcttccaattttcttgcttcctgatattcctttaaatcttgaaactttagctattattttaccctattcactaggtttggcagccgtgggtttacttgagtccatgatgaccgcaacaattgtcgacgatttaacagataccaccagtgataaaaaccgagaatgtaaagggcaaggtgttgccaatgtcgcttcaggcttcttaggcggaatggcaggctgtgccatgattggtcaatccattattaatgtgaaatctggtggacgtacccgtttatcatcatttagtgcaggggtctttctgttaattatggtggtgtttatcagtgactggcttaaagccattccaatggctgcactggttgctgtcatgattatggtatcaattggaacatttaactgggattctctacgcaatatccgccaatatcctctctctagcaatatcgtgatgatcgttacagtcgtcgtagttgttgccacacataacctggcttatggtgtattagtcggtgttcttctttctgcattattttttgccaataaaattgaacgctatatggcgattcaatctgtatttgatgaatcagaaagcacacgtacttatacggtaacaggtcaagtgttcttcagttcagcagataaatttacttctgcatttgatttcaaagaggcactttcaaaagtggtgattgatgtcagtcaggcacacttctgggatgtttctgcggttgctgccgtagataaagtggtcattaagtttagacgtgaaggaacagaagtcgaacttattggaatgaatgaagctagtaaaacattagtcgataagtttggtatccatgataagccagatgctttagatcgcttaaatagccactaagagggattagttatgtcaaaaattattgcatgtattgatggatcattagtaacaaatactgtgtgtgattatgcagcttggtttagcgataaacttaattcacctattaaactattgcatgtcattgataagccaaaagcaaaagcaccacaagatttaagtggtgcaattggtctaggaagtcgagaaaccttgctcaaagaattggttgaactcgaagaacgtaagggaaaaatcgagctagagcatggccagattcttcttcgggaagcaaagaactatttattggagaagttctctattgatgctcaaagttttcaacgccatggcagtgttttagaaacaatcatgggaatggaagacgacattagagttcttgttatgggtaagcatgggaatgaaaccgagcatgattccagtaaaattggaacccatattgaaaatgttgttcgtgcccttcataaacccgtattaataacgtctgcaccatttagtccacctaagtcttttttaattgcttttgatggaagtcagactgcaagaaaatgtgttgaacgcattgcgtcaagtccattacttaaaggtcttgcagtacatttggtttatgtcggaaatccgaatagtgaaatgcaaaatcagctctcttgggcaaaagagcaacttgaatcacaaggttttaatatcacctcgaatacgttggatggtgaagttgataaggcaattatcaattacgctgaacagcatcaaatcgatttgattgtggttggggcttatggtcattcaaagatacgtcaattttttattggcagcaccaccacaaaagtgatcacaagcgctaataaaccagtcctgttactacgataatttcatgaaggggtagaattttgatctatccctttatttttaataagttataaaaggaatcataaatatgaatacgatgttaataagcccaactctaaatgtttcttgttccgaaaatgtgctgttaaaaatatcctcatactttggtgtatctcatgaacaagcttatcgaaaaggcgtagattctcttttaaaattaacagagatggttatagcaaataatgaacattctgaaattattaaactttttttgtgtgattgtcatttaagaacatctatcaatttagatgatatatccgatatgcctactcaattgataggcgattgccttaatgtgattgttctacgttatgcatttgtagtttgacaatcaggtcgtaaactagacattaatgttctaaacttaaacaatatatttgtaaaccaaaaggttgaataaatgggacaagctaaacaaaggggtacacttgagcaaagagtaaagcaagctcaagaacaaaaagatgatttttatggaactgaaagaagtgtagcagaagttctagctgaactaggcttaccaaaagaaagtacagtaaaaggttatgttatccatctacctgaaaaagatgaatttgtagctgcaattaatgacaataatatttctttttcagttgcttatgctcggacacctgaattagcgatgatatatgatgaaccacaaaaagcgatttcagacgctaaaaagatttcaaaacataagctattggtttgtgttttatttgaaacttcaaaccaatacatgattaatgatatttgggctaattattagtctgagtttaaatctattatgtcaaaaattgcatatagttctaaacttatgtttgattgagtttagaactataatgtaaatctattcaattgtttttgttataagttattgattttcatctttatgagtttaaaactttattgtgtaaacacagcatttaaagcttcattaggtgactttttaggtggtggtgataacttaattaacacatggaaatctactctataaaggtctcacatactactatctcagaattttcagcgcgtcttttaatatttcattaatgatcggtgtgacaattactaaaataatctgctgaaatctcaataataatgatcagctaactcgctgatcattattttaagtgcttcaacttattgtgtttttggcaaccaataatattgcccattaagcacaacagtaaaaccatcctcaatctcagtaatcatttccgttttaatctttagagcatctatgtaaggaagttgatgaaaatacctaagcccatttctgggaagcaatttggctgaacctgtcagacaattatgaatttcatcgataatcaacatttttgtttcatacttacgcatcaagtgtacggcttgatttcgtaatttggcttcaggatcacttgcccgaaatggcacaaagaagtgatttaaaatattaatatagagttctttaacattggcttttgctggagcaagtatcggtaaaactggcttagttacggacaataaatccatgtcagcatcacttacggtttttgtataatactgtctagcaaactcatgaatgatagttgttttgcccatattggagtcaccaacaatcaacaagcattcaggtcttaatttcctagggcgattcaaaatatcggtcaatgtgttcatgatggtaatggctttcttatagccaatccatctatcagtaaataatgtctcaatccgttcactatcgcttaattgcatgatttcaagtacatgctctgcaagatgttcatatttttccattgcatcaccttaaatcgtcaaatgcagttaaaggagtactccacaaatcatcacttgtctgaagactttcagaaactacagcctttttagactgattctgttcggaaagctgagtaatggcttttgcattttccttttttctttggtttgagcgacgttgctttcgagtcaagcttctagcctgattaagttgatcacgtagatgcaaaatcgccttgtaaatctcatcctgattctgaacatcctgacgttcacttttgagatagttctgaacctgcttatattcaaataagctaatcggtggtatctctcgctttgcggtaggtactttaaaataggtattagaatatggctcataaaaccaaatctgtgaaatatccctcggatcacgtttaaacaagaattttcttttgcgctttcgattattgtcctctggatcaatagaattaacccattgtcttaaacagtcggcaaaatagaataagttatctttttgcacccctgtacgctgaatagtcgcttcaaattcaggtagaaaatcaataaacaaggtatcttcatctgatacacgttctttcaaacctgtacctgctgtcgtcttcgtcccccaaacaccttcttcccatttaacgattggggatgttcctaaagcggaatgtttcttctggtgataaactttagtaatccaatacacgatatagtattcaagctcttttaatgtcatacaggcttgtttagcggaatcataagtcccacgctgctgtacatttgaaaaagttgtaccatccaagacatgcatttcaagattgacgataccaagcatacgctcgatatgaccgccaaatcttgccccaccaattggtcggtattcccaatgaatcccatactttagacaagctttactgatgtgattggttctaaaatcggggccattatctgtatgcaccgagtccataatcccttcgacctgccattcagcatcaatatcgagttcgatcaacttacgtttttttgacaaaatacaagatgcgatacacatcgccactgaagtcgtacttggcgcttctagtgataggtaataccctacgatcatccgactgaaaacatcgattgccaaggttaaatgaggttttccaatcgcttctctaaactcgtcatccacgatttcaatatctagaggtgtatgatcaatctgcacatatgccaaagggtaatcagcatttggaaatgaaccagcagcagccttaaatttatctattgcagctttagatccaagacgtgctttcgttacttggtaatcatttaaagcctcgattcttctacgaatagagttttcatgcggtgcttcaagctgaagccgagaacactctgcttttacaatttcaatcgttttggaaatactgggtttcttcgcattcaaatattcatcattgatagcttgtttaatgatattgctcacttgaggtgacaaccttgatttttcagttgtccaacctcgttttttgggaatcaatgccattagagaattattttcccgataatctttaagccatttccacaatgttgagcgattcacatcatattcattcgccctattttcgaccagttcagtcgttgaatactcaatcaaaggcttaataatctcataacgttgtaaagcaatctgccaagcttcattactaatatcctgatcacccttattcaaacgctcagttagcgtatttcccccattaaaaatggtcaaacttctagcattgacctgtagactacgtaccgaatcaagacttgatataacaatgtcattggcatttaaaacattcacaattttatagggttgcccctcataaccgacaaccacattgggttttagaatgatacgactacgatcgatattgacagcattagattcaatcatttagatattcctcgcaaatgcatcattttggttcacccatatcactgtttcagccgttaaagggcaatacaagtcacaagcaatcatgcgctttgccactaatgcccaaacttggtgaattccttttaaaacattggttttatctttaaaaatatgggcaggtaattgattaattgttgattgacctaactcttgtagggtatcgagtaatagttgttgatcaacggcacctacatgagagcgtctaaatttttttaagaaattaatattttcccaatactgatcatataatcttgtttcactgataattttgaacttccatcctttatcagcagcaaaacgatgggctgctctgaattttggttttaacttatcccagtcctcaacaagctttttcttaggcttaatttcgatgagcattggtacaggaaaatcctcaaaatcatcacaattcgagcttgaaaactgcactaaaaagtcaggagtgtaggttgattggttacccaattcagtgatgtaggggataactacaggttgaccgataacatcaatcacattgttattaaattcttgcttaagtatgaaatcacgctcaagggtcgattcaaaccaaatggttttctcacctctaaaggcataatttcccgaaatactcccataaactttttaacaggtaagtattaatcactcaattttttcataaaaaagtcaccattcaggcactcgtgcctattaatgtaattttgcaagtcactcttatctatttatgtaaataatctaaattaattgtgtgaaattagagtgacaacctattgattatttataatgccactttattctaaactgtaaatggcagcggttcacaccctaaaccgggtgaaattactttatctcatttaggtgttctatttttagatgaacttcccgagtttgacagaaaggttctagaagtcttacgccaaccgcttgagtcaaaagaaatcattatttcacgtgcggctcggcaaattacttatccggcgaactttcagctcattgcagcaatgaatccttgtccatgtgggtatgcatttaatcaagatagccgttgtcagtgttcaccagaaagcattaaacgctatcaaaaccgcatatcgggaccgttactcgaccgcatcgatttacatattgatgtaccgccattaaaagctcaagaactgcaagacccaacacctgcagaagattctaccactgtacgacaacgtgtgatttatgcttatgaacaacaaatgcaaagacaggattgtttgaatcaggcgctctcacccaaacaactggaacaacatgctgttctcgatagtacttcacagcgaatgattgaaatggctcagcaacgtttaaatttatctgctcgtgcttatcatcgtgttttacgggttgctcgtactattgccgatttggcccaaagtgaggtcattcaaagtcctcatcttacagaagcactctcttatcgaggtaatcactcttaaaataaaacagcggattataagtccgctgttcttttattaagagcttcatttaaggtctcaattagagaggtgatttctttctctgataaagctgcaaaaccaaagcggatactacaattaggatattctttctgtttaaacttctgctctgtatcaatgttgagttcttttagctttatgagctgattttgagtaaatgatttctgaaattttacccacaaagccattccacccgcgggcggttgtatctgaatactctcagcaaaaactctttgaaactcagctaacgcatggtctcgacgtaactgataaatctttttcattttacggatgtgtcgcttgatttcccctcgttgcattaaatcggctaaagcgagttccgtaatattattgccctgccgatcaatcaataaaatatcttcagtaatggtttgaatgatagttggagctgccacgatgtaacctaaccgaataccgggtgcaaaaactttagacaatgaacctacatgaataaccaactcagaatgaggcaaacttgctaagggtggcataggccggctgtcatagtgaaattcgtggtcatagtcatcttcaataatgtaaaacccccatttttttgaaagttctaagagttgaagacggcggctcattgtcatggtaacggttgtagggtactgatgatgtggggttgtataaattgctgcaaccgagtgttcttttaaaatccgttcgagatcttcaataacaataccttgttcatctaatttgacagaaaccacttgaaagccatttgactggaatgctttaaaagcagatgggtaatataattcctcaacgacgatgacaccctgccgattgggtaatgcacgagaggcaagaaaaattcccatctggcttccacgtacaacacagatctcatcttcggcaacattcatgaaacgttccatcgacaacatttgttttaaagcctgccttagttcagccataccacgtgggtcaccatatcccatgtactggttttgagtaattttaatgagtgcgtgccgataggccctcgaaaacaattcataaggaataagcctcggatctggcacaccatcgttatggggccgctgagcaacttgttgaattattggtttatcactaacttttcgatcagctcttggctctatttgaggctttttttccggtaaaacatctgccacaaatgtgccttttcgaggccgagtcacaagccaaccttgagcctccaattcttcataaactgcttgtaccgtttttcgattaattcctaattcttttgacaggatgcgagaccccggcagcatagtgccctgtactaaacggccactcaaaatttcctgactaatcaagttggtcagttttagaaaaaccgttttttcttctctttcatcaatgcggaaatgtatttgccaaggtcttagcatattcgccccatctggaccatataacttataaaaactggatgtattgatccatccagttgttttttattctgccttcacctacttaatttggtcaactggactggagaagagatgaagactgcttctgtaaacaaacacgacttgatgcaacacgcacagcaagacatgcaaaagtggattagcgacttagatttaacagaccgtcaaaagcttgcactgacttgccgtattttatttgatcatgggcatgacgctggtttagcgggtcaaattacatgccgtagtgaaaataaagaaacctttattactcaacgtttcggtttaggttttgatgaaattactgcttcaaacttgcttgaggtgaatcaggacttagaacccatcaatcaagaaggcatggcaaacccagccaaccgtttccacacatggatttataaagaacacccagaggtgaactgtattatccatacgcatcctacctatgtagcggccctgtcgatgctacagattccacttatgatttcccaaatggacgtctgcgcactttacgaagattgctcatttgtaggccattggccgggtgttcctgtaggcaacgaagaaggtattttgatttcttctgctctgggtaaaaaccgcgctgttttgttgtctcaccacggtcaactggtcacaggaaaaactatcgaagaagcctgtaacttggctcttttaattgaacgcgcagctcaactgcaacttttagccatgtctgccggacaaatccagcctatcccccacgctttggcagcagaagcccatgattgggtgtctactgataaacgcaacaaagtgaactttgcttactacgcacgtaaagctttgaaaaaacattctgactgtatttaaaaagagacctcgaccatgaaattaaacggcattattggctaccctgttactcccttttctgatgacaataacatcaatcttcctgttctaaaacaaatgctggatttgcttattgaaaatggctgcgacgcgattgcacctttaggcagtacaggtgaaagcgcttatcttgaatgggatgaatggtgcttagtcgcgaaaacttcaattgaaagcattaataagcgcgtgcctgtcattattggaatttcagaactcacgactaatcaagccatcaaaaaagctcaaatcgcgcaaagctatggtgcagatgcacttatggtgattcctgtatcttattggaagctaacagaccaagagatttttgaatattatcaagcaattgcccaagcaacgactttaccaattatgatttataacaaccccgcgaccagtggtgttgatatgtctcctgaattaatcgtgcgcatgtttaataacattgcaaatattatgatggtaaaagaaagcagcggcgatattcagcgcatgcataaaatttatgagctatcaaaaggtgaacttccgttttataacggctgtaaccctctagctttagaagctttatgcgcaggggcaagcggttggtgtacagcagcacccaatctgttaggtcaacgacctcaacagctcattgaatatgtaaaaaatggtgaattggaacaggcccagaagtcattttatcagcaacttcctctactacgctttattgtaaagggtggtctgcctaaaacgattaaagctggtttacaactaaaaggtgtcgctgcgggtacaccacgcaagccgttgaccaaagccacggatattgagcttaaccagttaaaacaactactttctgaaatagaaaactaataaaaaagcgggtttattgacccgcttttttaaaaccccaacttagaatgttttagttaaactaaacactaaacctgtgtcataaggttttttctgagcatcagtcatgccagaagtactaatatctgtaccgacaacatctagctcagcaacaatacccaagatgttatagtttacgccgactttataatcaatatagctatcatcttcaccaggtccacctgcaactacaagtaaagaatctttatttttaagcttgttataaccaactgaagcaagtccagtaaatccggtgtctgcaattggtgccgaataacccacgttaaaataccagaactcgtcagagtggccccagtaatcgttagaataattcacgcccacactgagtgcatcacctttaaataaagaatctgcaaacgttaattttccataaaactcggtaaagtcaaaaccagtgtccccattgtatggattagtgaattttgagtcagagccaatgtaaccataacggatcacaccaacatcataagtcggtgcaagtgtatctgacagttttaaggtgttggtataacctaacgagatatcagtttcagttgaaacaccaggtgtattaaagtctacgcttgacccccaaagcgcaacataagcacctgacttatgagagaaagtgaagccaccttgaatagctggattatttgaagactgcgtaataccacggaagcgataatctgtggttgctgccacactaccagttgcggtgatgccgtaaaaagatggagcatcttcagccataaccatggttgaacctgccgtgagtacgccgaatgttactgctttaagtgcaaacttcatcattttgatctcccccacaatgaacgcacgatttatatgacttaaacaaattttgttacttaagctttagcaattgctgtgccaagttcatatttggtatcgctacacttcattaatttagagactaaaaaacttatataacgcgaaaaataaaaatcttccaaataattatctttatatataacaataaagtatgaacattttgtttgcgtaaaatataaagaaaacatgagaaaacaccttatcggaaataaacaagccgagatcggtagtattgaatggtagggcgtaaagtctctatttcatttctatataaagagataaaaactccataaatttattagtacagagcctctttatttaacccttatttttatttatgaaccattttgggctttttccgcacaaaaatataaatgaaaaacaaattgcacaaatttcatgcaaattatcgcactaaatttgatcgatagagtctaggatttttctgacatcgctttcgtctctgttttaaacaattttttgatataaaaatgttataaagtaacaatatagagtgagattactaaaaattgctcaagaaaattgcttaagaagagattaaaaagtaaacatatcaaacaaaaaagagtaaaaattgaacacaaaaatcaagtatttttaaaattttcacataagaaaaaatggtaaaattcaactaaaaaataaattactttttttattttaaacaataaattaactataaaaatctaaaaataaatctagttaaacttccctaccacattaatcaaatcctgcatagcatatataaaataaaatgaacaaaaatatatcttttttatagattacttatacaattgatggaaatcctaggccctgaacaataacaaggcacaggatttatcgtttttatgaggttctttaaatatgctaaaagcacaaaaacttacattagcagttctcatttctgcggcaataatttcctcagctcaggcaagcgagcaaagtgaggcaaaaggatttgttgaagatgcgaacggttctattctcttccgtacaggttacatcagccgtgacaaaaaacagggcgcgaaagataccagctcagttgctcaatcagcaattgtaagtatcgaatctggctttacccctggtatcgttggtttcggtgtaggcgttgttggtgatggatcatttaaaattggcgaaaacaaaaacgctggaaaccaaatgattccaaaacacaacgatggttcagcttacgaccactgggctcgtggtggtggcagcgttaaggcacgtttctcgaatacaacagtacgttacggtactcaagtactcgacttaccagtccttgcaagtaatacaggacgtatggttcctgaatacttcacaggtactttattaactagccatgaaatcaagaaccttgaggttgttgctggtaaatttactaaagaccaaatgtctgaccaaatcaataccgatgcggatgcttctggcagaggtcttgaccgtgcaattgtttggggtgctaaatataagtttaatgataacttaaatgcatcttattatggcttagacagcaaaaatgctcttgaacgccattatgctaatgttaactttaaacaacctttagcaaatgacagttcattaacttatgattttagtggataccatactaagtttgatgcaaatgcacacacttattcagcaactggaactgtagcaccaaattatgctgcggatggtatagctggcgaagaaaagaccaataatatttgggctatttcaggtacttatgcgactggtccacatagtgtgatgttagcatatcaacaaaacactggtaatgttggttacgactatggccaaaatgctgatggtttccaaagtatttatttgccaaactcttatatgtctgatttcatcggtaaccacgagaaatctgctcaaattcaatacaatgttgattttggcaagttaggtgtattacctggtttaaactggaccactgcatttgtatatggttgggacatcaaggttagaaatgtaactgatgatgctcaagaacgcgaattctttaaccaagtgaaatacacagttcaaagtggttttgctaaagatgcaagccttcgtattcgtaactcttactaccgtgcaagtgatgcttaccaaggcgcttacatcggtgataccaatgaatggcgtattttcttagatattcctgtgaaattattctaattcacagatttatcaagcataaaaaaaactacctctggtcacacaggtaggttttttattaagcccagaatatcaattgcgacgctctaggcttaaaaattagagcttattttttagcagcttcgattgctttcaatacttccgctttagcaacgtcagcaccttcccaaccgctgattttcacccatttgcctggttctaaatctttatagtggctgaagaaatgctcaacttggctaatcaacaatggaggaagatctgtatattcctgaacatctttgtaaagcggagataatttttcgtgtggaacagcgattaatttcgcgtcgataccaccgtcgtcttccatgtttaatttgcccactgggcggcaacgaattacagaaccggcagcaacaggatgtggagttacaacaagtacgtctaatgggtcaccatcttcagacaaagtatttggtacataaccgtagtttgctggatagaacattgctgtacccatgaaacggtctacaaacaatgcatcagagtctttgtcaatttcatatttaattggcgctgcatttgcaggaatttcaatgatgacatagatgtcatttggtgcatctttacctgctgggatattgctgtaactcatatcaatactctttcgttatgaagtcagatgtaaaatccactcgattataacgtggatatcatcaaaatgatgccgattatacaatgcgcacacgcgaaagttgatatgaatggtgacagaatgacactcaagtcaacttaattgtcacgatcaacaagaatattgggcataacaatgataaaaaccagacaatagagcgtaaagttgcccaattgcttaagtaacaaatgccataaatcacacgtaaaataatataggcccagcccaatcttaaaataaagtattcaggaaccaccatatattcagccatcaaaatagctgttaaaaataaaggtaagctttcaaaactgttttgttgtactgcatttgcccgagcagcaataccctttgtattagcaagaaaatctcttgggttctgattatcgacgggctgaaaaccaccggtaaattttgcaatcacggtaaatgcgtatggcagcaaacatgccactaaaataatatagataatgctgctgatgccgtgcatagtgccatccatcactgaaaatactgttgatcatgctatcataactcatcgtttttacctgaaattttatgcaaccgcatgtcatcactgatttatagggctatgtatgcaacaacctgatcaaaaagaattattcgaggtcttagaaaagcaaaagaagaaccagcttcaggtagatcgtatattcaaaattgtattaccgatcgtcgcttttttattaagtgtaatttgtgcgaattttaattggcaatctacactgggtaccttcgtgatcttaacagtgacctttattgctgtgggtgtcaaaagacttcctttgtggcactggctcattgtgattaccatatattgtcttgtagataattacctcagttatggtcaacttgatgtaactcacttacgtctacaactcggtaccatgttagtttttgtcggtatggtcggaattggtcgcccttatgtagatcgttggtttatgaaaaaccattaaaataaaaaaagcgccttacggcgcttttttattcatcattacgcaggcttacgtaaatctttacgtaaaattttgcctacatttgattttggtaattcatccataaactcaacataacgagggcgtttatagcctgttaagttttctttagcaaagttcaaaacttcttctgtagttaagcttggatcttttttcacaataaagagttttggcacttcacctgatttttcatctggaacaccaattgcagcaacttccaatacttttggatgtttagcaatcacttcttcaatttcacttggataaacgttaaagccagaaaccaaaatcatatcttttttacggtctacaattttgacgtatccacggctgtccattacaccaatgtcaccggtacggaagaaaccatctgctgtcatgactttagcagtctcatctggacggttccaatagcctttcattacttgaggaccacgaattgagatttccccttgttcacctaaaggtacttcttttccgtcatcatctaaaattgcaacctcagttaacggtaatggaataccaatggtgccactaaattcagtagatgcaggtggattcgcagttgcaactggtgaagtttctgataagccataaccttcaataatagttgtaccagtaattttcttccaagcttctgctgtagatggaagaactgccataccaccgcccatcgccatttttaagttgctatggtcaagttgcttgaactcttcattattcaccaaggcattaaataatgtatttactgcagggaagaaagaaggttgatatttacgtaattccttaatcacagccggtaagtcacgcgggttcggaattaagatatttgcctgccctttgtacataccgtacatcgcacaaaccatgaacgcaaaaatatggtaaagcggtaatgcacaaacaatacgatcgcctttagcaccatcgtttgcaccgaatttgctttggaaaataccatcacactgtaaaaggttggcaaccaaattgcggtgagtcagctcagcaccttttgaaacacccgttgtaccaccggtatattgaagcacggcagtatcacttaaagttaaagtcgggcgtttataattgcttggattttctttatttaatgcactgttaaatttaacatgcccaggaatattccaagctggaatttgtttacggactttacgtaaaacaaagttcaccaaagtacctttcagtgtacctagcatatctccgacagaagcaacaactacatgcttcactggagttttacccaaaatgctttggtaaacacttgcaaagttctcgataataacgagcacttctgcacctgagtcatttaactgatgctcaagttcacgcgcagtatatagtgggttaacattcactaaaaccaagcctgcacgtaagactgccaatgccactacaggatactgcagcacgtttggcatcattactgccacacgcgtaccttttgctaaccccaaattttgcaaataggtcgcgaacttacggcttgcaagctccaactcgttaaatgacatggctttatccataaagataaaggcatcacgagaaccaaatttttggaaattacgctcaaaaatatcaacaagtgaggtattttctgcaggcaatgctactgtttctggaatccctgtcttttggtattctgcaaaccaaatcttttccataatgccattatctccgattcgtaatccttagtaataactgttattcaatgccccagctattctttagcttcttggtgccagaacatatttaaaacttattggcacattcataacactttcgaacaagattatgagacagaagttttgacaatttaagcctgccaaattttttgcatggagtacaaattacgtactccaaattgctgcccttttaatcattattcaataccaacaagttcagttcattgcttgaacatgttgccatatatagcgtatttatgttgccagacgctagctttatctctgaatcaacagtttatttgctttttgatatccacgtggtaagagctgacctttcgaagcacgtttacccatgtatttttgtagatcatcaccttttaatttgagatgttgttgacctgcaaccacctgaattatttcatctaagttcagggttgtcatggataaaatttgctcttttccttcaagttgtatcaacttattacctttacctttatttaaatttggtagttctgccaaatctaaaattaacaaacgccctgctgagctcagtacagccagatgcgtcatgttttgggcagaaatgagtggtaaagcctttgccttatccggaaccgttaagaatgtcttaccggctttcgcattggtatctaattgcttggtttgcgttttaaaaccataacctgccgaacttgcagcaatcaattcagactcatcatcatctaaataaacctgaataaacgatacgccacttgctggtgataatttagaacttaatggatcccccaagcctctcgctgaaggtaagttactaattggcaaggcatagctgcgccctgtttcatcaaggaagtaaactcgctgattggttttcccgacagcatgacttaaatattggtccccagcacggtagttcagattttcagcatccacatccgcaccttttgccgcacgaacccagcctgcttcagacaacacgactgttaccgtttcggctggcattaaatcctgttctttaatttgaaccgcttcagcacgtgcaacaattggagaacggcgctcatcaccgaactttttcgcatcttcttttaattcgccaataatcaaattttttaaagattcaggattttcgagttgttcacgaataatggcagctttcgcggaaagctcatcttgttcatgacgaatttccatctcttcaagctttgccaaatgacgtaatttaagctctaaaatcgcctcggcctgtatctcatcaatattaaagtgttccatcaagactggcttaggctggtcttcttcacgaataatacgaatgactgtatcaatatcgagataagcaattaaaagacctgccaaaatatgcaggcgcttttcaatacggtttaaatggtactgcaaacgacgagttaccgtttttttacggatctcaatccattccagcaaaatacgacgaattgatttcacctgaggacggccatcttcgccaatcatgtttaaattgacacgatagcttgattctaaatcggtggtcgcaaataagtgactcatcactgcttccgcatcaatacggttagagcgcagtacaatcacgagtcgtgtcgggttttcatgatccgactcatcacgcacatcgacgactaatggcagctttttagcctgcatctggtcagcaatttgagtaattaccttagaaccagagacttgatatggcagctcagtaattacgatttcatttttctcaatggtatataccgctcgcatacggtaactgccacgaccagtggtctggattttgagtaattcttctggcggggtaataatttcagctttggttggtaaatccggagctggaatatattcagctaatttttcgtccgaggtttgcggattacggattaaagcaattgtgccttttacaacttcacgcaaattatgtggcgggatatcagttgccatcccgacagcaatacctgtcgtaccattaagaagaatattaggtacacgtgcaggtaaagtgatcggttcttttaaagaaccatcaaagttatcttgccattcgctagtgccctgacctaattcgctcagcaataattcactataagccgagagtttggcttcggtataacgcatcgcagcaaaagatttaggatcatctggtgaaccccagttcccctgaccttcgattaaaggatagcggtaactaaatggctgagccatgagtaccatggcttcataacatgccaagtcaccatgtgggtggtatttaccaagtacatcacccactgtacgcgctgatttttttggcttgccactgctttttaagcctagctcgctcatagcatagacaatacggcgctgtacgggctttaagccatcactgatatgcggcaatgcacggtccataatgacgtacatggcataattcaagtaagcctgttcagtaaattcggctacagagcggttttctgtcgcatgatgcgcaaggctggtcatagtcagcttatcttccaaatcagtcgttattttaagtgtgtattatgctaagtgggctatgttacagacacaagggggactctgtcacctgagcgtcaaattgtgtcttatctctctatatttttagttacttgctataaagttaggcaaaaactatagcccaattgactctagccttttaccttgagtctcttcacctaatatcaaaatcactaaagctacggcaagtaaaaccacagtaaacatcataaaaacgtgattaaagccgtttttagcaaccatcatatgtgtcacgaccattggcgcgacaattccaccgatacgccccattgccgatgcccagcctgacccgaaagcccgaatattggccggatattgttctggtgtataggtatataacactccccatgcacccaaattaaagaatgacatgagacagccccagaacataatgctatttacactgtcggcttgtccaaagaaatatgccgacaaagcacaaaaaccgataaatgcggcaagtgtaatttttcgacctaaacgctcgacaaaccaagcagccgccaagtagcccggtaactgcgccaaaatcataagcaatacatattcaaatgatttgacaatgtcatagccttgtttcaccaataaactcggcaaccacgtaaagatgccgtaataggaatacacaatgccaaaccagattagccagagcattaaacttctacgagcaaattgaccactccaaagctgtttaaatgaaactttttgtcgcatcgccacaggcacgacttcaatatggtgaacaatttgcacacatgcttcggcttctagtttttgtaccagtgcatgcgcttcttcgatacggccacgattaatcaaatacggtatcgactcagggacttttttccaaatcactaaaatataaataagtggaagaccgcctataagaaaggcaatatgccaaccaaatttaggaataataaaataagaaatgagtgcagcaactagccagcctaatccccaaaaactttcaagtagaacgataaatcttccacgaacatgagcaggcacatactcactgaccagcgtgactgctacaggtaattgaccacctagccccaacccaacaataaaccgaaaaattaatagccacttcagatctggagcaaaagcacataacgcagtcgcaatactataaattgccattgtcatcgcaaatacagttttacggccaaaacgatctgccaaggcaccagaacaaactgcacctatagccatgcctacaaagccaatactgacaatccaaccgctttcaactggtgttaatgaccagtctttaacaagggttgtcataataaaagcgataatgccggtatccatcgcatcaaacatccagcctaaacccactacccataaaagcgtgtagtgaaatttgccaattggaagattttgtatacgtgaaatcagatccataggattaactctactggaaagaataagtggacaagaccatatatagaattgttatatcatgcccacatgaaattctgcatgattaatgttcgtcggttgaagaagccgactccgcatcatcatctttataaataaatttaggcatttccaaaccaaaataaatggcaattaaacgaagcgtaaaaccgaatactaaggttgaaataacggtaagttctaaactcaaacctaagtctagacagacccaatagcaaatgactgcaacaaaagaaatacttgcatacagctcacggcggaaaacaaacgggacatcgttacataagatgtcacgtaaaataccacccgaaactcccgttaaaacgcctgctacagccgacacgacaaaaccatgccccatctgtaaggcaatctgacaaccaataatggtaaatccgattaagcctaacgcatcgagcaccaagaaaatgttatgtaaatgacgcatccatttagcaataacgatggtaacaaatgcagcacaacacgttaaaactaaatattcaggatgttttacccacgttaaaggatagtgtccaagtagtacatcacgtacagagccaccacccaaggccgtcacacaggcaattagtacaacaccgaaccagtccatactccgtcgcccagcagacaatgcaccagtcatggcttcggcagtaatcgcaataatataaataacggtgagtaacattgccctttccctcaggccaaacggtgggcgtattttaagataaagttataggaattgtgcacagcattgtttaaatttttttcctgaaccacatatacaaggttgtttcatggtgacctgcatatcgaccgttggatcaaggaaaaaccattgttgctgatgaaatacaaaatgtgaaacttcatgatgaatttgagcgcttttaccatcatgataatgggccttgaactctacctgtgcatgggttttatctaatttttcgttggcgttaaccacctctaaacccaaccattgattttgtttgctccattccgcaatagcctctttatcaagagcagtttgctgacctaaagccgtcgtttgcacaatataatcaatttgctgcaatgcaaatgcactataacgtgaacgcataagctgctctgcggtgagtgcttttgctgtgcctaaatgtaaaggttcacaacattctgcatagctgccttttccgcatggacaagtttgttgggtcatttggtacttctcaaataaaaaatagctcaaagttgagctattttatgatgtttctaaatctgacacgcaatttaatctttcgattcatcttgttcgatagaaacaatatgaactttctcgattttatggccttccatggttacaacttcaaagcgataaccatccgcttcaacagtttcaccattttcaggtaaacggcctaaatggaataataaataacccgataaagtagaatattgttcactttcatcaactaagtcacgaccaagtaaaagcgatacatgacgaatatcggttgaaccttcaagtattaacgaaccgtcttctaaactttctgctgctgcatctagttcgtcttcatcagggaactcacccgcaattgcttctaaaatatcaattggtgtggcaataccttcaattgaaccatattcatttagaacaatcgccatttgtaaaggagcctgacgtaattgctccatcaccataagcacttgagcattttcatgcacaataactggctcacgtaagtgcttttgaaaatcgataacgcctgtttcaataaagccatttaaaactttatgtgtaagcgcaataccttcaatattatcaagttcaccacgagcaacaattaaacgtgaatgtgtcatcgacattaaacgttcttttaaaacttctggttcttcgtctaaatcaatccattcaagctcaggtcttggtgtcatcactgactttactggacgttcagataaaccaagtacaccttgtacaagcacactatggtaagcgccattttcttcatcaaagacttcatcagcaaaagcttgagttgccaatacatcttctttatcagccgtttgagcgtctgaagtagaaccgctatttttactgcctaacatacgtaaaacagcagaagctgtgcgataacgtaaatctgtagtagtcactagcttctcttggttgcgacgcatggtttggttgatcatttcgactaaaatcgagaaaccaatcgcagcatataaataacccttcggaatatggaaaccaaaaccttccaccaccaaagagaaaccaatcatcatcaagaagccaagacatagaataactactgttgggtgtttattgacaaagtccatgagtggtcttgaagcccacagcataatacccacagcaattacaacagcaaccatcatgactgacagttctttcaccatacctacagcagtaattacgctgtctaatgagaatacggcatcaagcacaacaatctgaacgatgaccatccagaacgcagcatgaacaggattatcttctttatgaagttgtttaccttccatccgctcatgcaattccatggtgcctttaaagagcaagaacacaccaccgaacaataaaatcaaatcacggccagagaatggatggctaaaaatatggaaaagtggttgggtgagtgtcacgacccaagcaattgaagctaagaggataagacgcattcccaaagcgagtattaaacccactatacgtgccttagtacgttgttctggtggcagcttttcagccaaaatggcaataaagacgaggttatcgatccctagtacgatttcaagaacaattaatgtcgctaggcctacccaagcagacggatcagacatccattcaaagatcattgatcctgctcctgtgctgggtggattttatctttattgggcaacgcaaaaggcatgcctagacaaagggggaataatgtttttttaggacaagaaattaaaacggagcgactacaaccactacccatatttgttcatatgttgttaaacgaattttcagtataggcaagatttaacataaattcatcatttttatttgatcattatatgtattcaccaaacccatacaaaacatgaatctttcctataaaactgcttataaagttgtcatattttttgcttagtgtagacaagaaatatgaacgtgataaggtgaaaataaagcaatgaatagcgtattaacaatggcagtaaatgattcaccaataacatctgtaaaaacaacacaacctcttattgcattatattgtggctcacgagcaggaaataacccgatttatcgcgaaaaggcaattgaattagccagcggaattgctgaacaaggttttggtttggtctacggcggtgccagtattggtttaatggggcaagtcgcagaaagcgtacttgcacatggtggagaagctgtaggggtcattcctgaatttatgcttgattatgaagtggcgcatgcaggactgaccgagttacatgtagtagaaaccatgcatgagcgtaaagccatgatggcagagcgcgcgagtgcttttatcgcgctacctggcggtttaggaacattcgaagaaattttggaaattgcgacttggggtcaactcaatcagcaccaaaagcctatgattttatataacgtaaatggtttttataatgcattaattgctcagttagaccatgctgtacaagaaggcttccttcctcttcagcatcgagctaaattaattgtatgtgaagaaatcgaccaaatttataacgtcattaaaaacttaaaaatgccaaagagatttgttgtttaagctctctacctcaacaaaaaagcggattcttccgctttttttattttatctatctatactcattttataatcattcacttgaaagtccggttatatagttgctctaaataatagaagttaaacttacaaagcgtttattcaacattgacttactttttttaaattcaatttgttttacactaggcgaaaacgttaattttcaaatgttatgaatgccacgccaacccatcaagccttgcaacccgaatatcgcctattggttcttttggtttccattggcttttttatgcaggcattagatacaacaattgtaaatactgccattcctgcaatggcacatcatttaaatgaagatccattacgtatgcatagcgtagtggtggcttatgttttatctgtagcggcctgtattcctttaagtggatggttggccgaccgctttggtgttagaaatacgtttttatcagcaatcattattttcacacttgcttccttaggctgtggcctttctcaaagcctaaatcaacttttatttttccgtgtcattcagggtgttgggggtgcgttattactccccgttggtcgtttatcacttttaaaaattattccccgaactcaatttttggcagccatgagcctcatgagtctagcaggtttactaggccctttagcaggtccaacactaggtggttggctcgttgaagttgcaacgtggcattggatctttcttattaatattccaatgggagtattgggcatattaatgacattaaaggtcatgccaaatgtaaaagagcctaccgttaaaacttttgaccttattgggtttgtgctcttagtcatcgcaatgattggctggtctttgggtattgaacatcttgcctcacctgaatattccaaatggtttagtatttctttattagtggtcggggcagtcgcaaccctttggtatgcctaccattcacatacccatcaaaatgcattgttccgtagccgactctttagaaacaagatttacgcgattggtattttaggtaatttctttgcccgctttggtggtaatgccttaccttttgttttaccactcatgttacaagtcgcttttggttttgagccattcattgcgggattaatgatgattccgctagtgttagggtcgcttttctccaaaccgattgttagaccgattatccagaaaatgggttatcgccgctttctattaattaacacaaccttagtgggtctatgtattgcgtcttttaccattatgactgttgacaccccaacttggtttagagctttacactttttcttattcggtacattaaactcattacaatttgtgggaatgaatacacttaccttaaaagatttgcctcaacaagatgcaagtagtggtaatagtttcttatcaatgattatgatgctttcaatgagtattggtgttgcactggcaggtactctcattaatgtatttaccgattactatggtacagcacatgtgacaactgccttccatgttaccctcatttgtttaggctgtattaatatcattaccgcactgatcttttggcaaatacccaaaaatacgcctgtgtaagcagttgcatttttagcgtggtttctcgctcgcgaatcacgctatgatgtgaacttcatattaatactgagttttgcatgaccaagctggcaaaaaccttttctgcaccacgctacaataccctcattgggattgttttagcttgtgttatgggggttctcacctacttcggtctgttctaccagcaaaaagctattgctcaagattatccagttcaaggctttgatgtctctcaccatcaagaaaatatcaactggaaaaaaatatcacccaaaaaatttcagttcgtctatttaaaagcgactgaaggtggtgattataaagatccaaaatttcaagaaaactggttaaaagcacgcgaacatggctttcatgtcggggcttatcatttttaccgtttatgtcgtgatggtaaaacacaagctgaaaattttatttcaaccgtacccaacaaagctgatgcccttcctcccgttattgatctggaatatgacagcaactgtattaattctcataccaaagaacaattacttaaagaaataggcatcatgcatgacagcttaaagcatcattatggtaaacagcctatcttttatatttccaaaactttttatcacattgtattaataggtagtttccctaatacacctctttgggtcagagattacgaagggaaacctgagctgaaagacaagcgaaaatggctcttttggcagcatagtaatcaaggtaaaattgaaggcatgacaaagccagtagacttaaatgtttatgaaggttcagtcaaagaatggcaccaatttttacagcagcaaggcatcgtgaaagcacaataatatgcgcaaaatcattcatatcgatatggatgccttttatgcatcggtcgaattgcgagagcgtcctgatctaaggcatctcccggtagttatctcttcgcatcacccacgcgccgtaattgcagctgcttcttatcctgctcgtcagtttggtttacgctctgccatgtccatgagccaagcaagaaaactatgccctcaagttgttattattgagccgaatttcgaaaaatatcgtgccatctcggctcaaattcatagtatttttcaacaatacactactcttattgagcctttatctttagatgaagcctatcttgatgtcactgaaaatttaaaacaaatcgcgagtgcgaccgaagtagctatgcatattcgggaagatattttcaggcaaaccggactgacagcctcggctggtgtagcacctaataaattcttggcaaaagttgcgtccgactggaataaaccgaatggcctgtttgttataaaaccttctcaagtagccagttttattcaggacttacccttaaaaaaaattccaggagtaggcaaagttacccaagaaaagctccaacagcttgagttgcatacgctaggtgacttacaaaaaattgaagaagctgttttagttcaccactttggtaaatatggccaacagctttatttatatgctcaaggtatcgacaaccgccccgttcaagctgaacgtgcccgacagcaaatttcgaaagaaaccacatttgatagtgactttactttagcccagtgccaaccctactggcatggtctagccgaaaaagtctggcaaagtttagagaaaaagcaactgaatgcccgaggtgtaaatattaagctcaaacttaagaatttccagactttgcaacacagtaaaagttttaaaaacccaattcattctcaacaagacctgattcaagttttattcttacttttaaatgagatgcatattcccgaaaacttccaatttcggctcattggtattggagtttatcaattacaaactaaagctgacgactttcagttgtccttatggtaagtgttgtttttttatacaaaagaacaagttttaaacaaaaacagttcccttttgcttaaagtttgaagtaatctaatcagcgcatattcattacccatgtatttgcaacatgccaaagcaacctttactttcggcatatcgtcctgtgattggcgtgacgaccaaatccgaatattacagggcacttaaagtacatggagcttgcccgttcttataaatcacaacaataatctactgaaattcttttgcacttgcttgcacctgcctacgaactcttcataaaatcgaactattcaataaagacactttagagcatttttatgacggtaaaacgcttacacgtgacttcaagatattgtgaagtggcgatttcgggtaatttagtccatttagcagggcagctcgctgatgacaccagcgtggatattacggcgcaaactcaacaaactttggacaatattgatcgcttacttgctgaagccggaactgacaaaagtcatatcctgtctgtcatgatttttctaaaggatattgataaggactatgcagccatgaatacagtatgggatgcatggattagcaaagagcatccacctgctcgtacttgtgttgaatctaaactttatgcacctgatgtacttgtagaaatgaccgttgttgcggtacttccttaattcttattaattttaattaataaaaaaactgagcaagatcatgatcgatattgctcattttttatacttttaaagttgataatatcagcatttttaaaatcttatttaatgaggcttaaaattaaatcactgtaagacctaatttttaagactttacaaaagcatttgaaattctttctagctgaggcgttacatgtaaagttgccatctctgattcaggggtcaataagtctcttcttaactcatgataatctggcacagtgctgtaacttaatacacgatagcccgcaagctgtaataaacggcgctcatattgttgatgtgctcggcgtaaaccactttcttcaagcataaccactacaacaacctgataattttgatcaagcacaacaaagtcagctgtcatattttgatatttgcgacgagtgtgagcatatttcgttgttaataatgcatcaaatgaaacatgagctaacacagtaaatttaggcaatactgtctgtaaacgagttaatgtcatttgttcatgactacttaacacggcacggcgctttaaagcactgtcttgttgatgctttcttgagaggcttttcgccgccataacaacggtcaaaaatagtaataagatagtaattaaatagtacatgggtccatcctttaagttttttataatgattttgctagatcacgctttgttttaattgataacgacacagccgttctttaaaaggttcacttagtaatttcacttgtagttatcaagcttggcttaaatttagccaccctcacattatttataaacacagactcagcaacaatcaagtgcagctcgtcagatttttaggatttatcatttttcattacactttttacataaaaaatactaagaaatctcaccatatgatttatccactcactttaaaaataaaaaaggctcttaaacagagccttttttatcgttatccacgagcttttgattttggtttacttttaccaccaaatggtctcttttcacctgtctcacgaggtggtagacccgtatgttgagtcagtacctgccctttttgcggtcgtttatgctgatttttattttgaactgtttgacctgaacgcttcactgaatcgcccgcaacagtcgagttcttcttacgtgcagatttatattctccttccgcccctttcggttgataagttggaattaaatgttgctttgagttaccaattaaatcagcacggcccatttctttaagtgcttcacgaagtaatggccagttatttggatcgtggtaacgtaagaatgctttgtgcagacgacggcgtttttcaccttttacaatgtctacattttcagtgtaacgcgccacttttgcgagtgggtttttccctgaataatacatggttgtcgcagttgccatcggtgatgggtagaacgtctgtacctgatcagcacggaaaccattcttcttcagccagatcgcaagatgcatcatgtcataatcagaagtacctgggtgtgcagcaataaagtaaggaattaaatattgctcttttcctgcttctttactaaagcgatcaaacatttgtttgaaacggtcatacgtaccaatacccggtttcatcatcttagataaagggccttgttcagtatgctctggtgcaatttttaaataaccgccaacatggtgttgtaccagctctttgacatattcaggattcaatactgcaaggtcataacgtaatcccgatccaatcagaatcttcttcacccctttaatcgcacgtgctttacgataaagctgtactaaaggtgcatgatcggtatgcaagttttgacaaacacccggatatacacaagaaggtttacgacagttcttctcaatttcaggatctttacaatgcaaacggtacatgtttgctgttggaccacctaagtctgaaataataccggtgaagttcggcgctgtatcacgaattttctcgatctcacgtaagatcgaatcttccgaacggttttggataatacggccttcatgttctgtaatcgaacagaatgtacaaccaccaaaacagccacgcataatattgaccgagaatttgatcatatcaaatgcagggaaacgcgcatctccatatgcaggatgcggcaaacgtgcatatggcaaatcaaatacataatccatttcctctgtggttagaggaattggaggtggattgatccagacatcacgctcaccatgacgttgaaccaaagcacgtgcattacccgggttggtttcaaggtgcaaaatacggtttgcatgtgcataaagtacttgatcattcgccacttcttcaaaagaaggtaaacgaattacagccaattctcgcggaggtaacttgtgtttaatcgcttttgactgagcaggctttagctgaacaatctgagtattttcatcaagttggtcgccttcacgtacaatcggatttgcaacaatttctttttgaaaaccttgatattgagctagtgtgttgcctttatctttctcaatttcacaaccatcaatatcttcagtcatgacatatgggttaataattgggtcaacacgcccaatcgtatctacatcattactggcaatttcaacaaattttgctttagccgctttgttatgtttattaataataaatgctgtaccacgaacatctgtaatctcgtggattttttcacctttagccaaacggtgcatcacatcgataatggctcgttcaccattaccatacataagcatatcagcttttgaatccatcaaaattgaacgacgaactttgtctgaccaataatcatagtgcgcaatacgacgtaaactaccctcaataccacctaatagtacaggtacatctgggaatgcttcacgacaacgttggcaataaaccgttgccgcacggtcagggcgtttatttggttcgttattaggagaatatgcatcatccgaacggattttacgatctgccgtatagcggttgatcatcgaatccatattgcccgcagtcactccccaagcaatcgttggcttacccaatacacggaaactttcaacattggtccagtctggctgtgcaataataccgacacggaaaccttgcgcttcaagtacacgtccaatcacacccgatacaaatgatggatgatcaatataagcatcgccacagactaaaataaagtcacacgcatcccagccgagttggtccatttcttctcgtgacatcggcaaaaatggcgctggttcaaaacacgacgcccaatatttgtcgtaatcaaacaacgcttttggcgcagtttgcatagtataagcggtagacatggcttgcgaatctcggctagcagatggaggagagacatctaaagatgaaagccgatcattttaacatgaatttcattcattttccttgtttataaaacacgcgaaaacaataatatagaaattaatttgattaaagtttgctcaatattttattcttagattaaatacggcggaataaaatccgccgcagatcgaactcatttatttatataatttagaaaagagcttttggtaaacgaatctgaataatctcgttatcatcggccaactttgcattacgtcccgtcgacccagggaagttattatcattgaaaaccgtcagtgttgtaccattttcaataattacatcttcaatggtttcaaatgggaaggcaaaaacctgtcccgtaccaatatcccctgctctagctgtgccatacaacatattcgggttagcaattttaattaaatcaactaagtcttcgcggctgaccagctggcctgactcatttaatttaatacggattaattttttatagccgcctaaattattctgcgtggcatcacgttcaataatgatcccttctttatcattaaagagttggaaatcaccaatattggtagctttactgtctaactggaaccaataatattttcctgtatacgcttttttcttcaggtcaaattgagaaatcagcaactgtctttctgtttcccgaattgatttaattggcttttctataagcggatagagatactgcccatctggcgaaatcgccattccttcaaaaccgccactttgttggacaagaggttccacaaaattaatttgtgctttattaaattgattttgtggtgaacgtaattcttgagtcggatttaatggatttggtaaaggaatcggagcgtctaaaagtacaccatctgctgagaaatggagtaaatatggaccaaattcatctccaatccagtaagtcccatcactagtacgctgcatcgactctgggtcaaaatcagcacccgttaataaacgctcaggtgtattaccattgatgatattaaatggaattaatttattcggatcacgcagttggataaaactttgtacattaacttgaccggtgcctttagttttagttttgaaatcaggctttattttataaatacgaagtaaaaagtctgatgaattatcttgagtgccaaaaccgttatcggccattgccatataactgccatcttcattttttaatgctgcagaaaatccctgtacaggttgacctttaaacggaggataaattccatttgcacctttcacatatgcccctgagtctggtccagcagcataagtttctacaggtaacttagcaaaagaaattagagttggttcggtaacgttttcagtaggtgaagtttgatcttgatcgttatcatcgttacatgccgtcaatcctaaactggcacagcataataatgcgattaaagtttttttgctcatgattttatacagttggtaaaaaattaagcaaatttaatcaagcttgtatgaagtttttgcttcaaaaatatgaaatctttatggcgaaaatatgacaagcctattgtttaacacccaatagaaaaccgaacttgttagtaaagctaattaaagttttgttggctgatattctccagcaattgctgcttttaaaaatttttggaaagtgggacattccatatgattttcagcaggacatacagcagcgtgttctaatccctggctgataaaatgcaatcgctttgccatttgctctaattgttcagctttatcttttagtttttgacggtcaagatcaggcttaccatcttgcccaaacattgtggcaatttcatttaaagaaaatcctgcagcacgacctaaagcaattaatgctagttgatcaattacttgtttgctgtattgtcgacgtaagccttgccgccctatcgatttaattagtcctttctcttcataaaaacgtagggtagccgttgtgacttttgccttcttagcgacttcaccaatatccataacatcctcttgacttcaagtgaacttgaacttgcacaataaatttatcacgtttcatacgtataaaagcaaggtgtaaaaatgaatacctccactctgttctttcaagctttatgtcttggtattggtgcaaccatcgttatggatatatggctattaatactaaaaatatttaaggtcccgactttaaactttgcctttcttggacgttgggtgggctggatatttcaaggaaaactcgtccatcaatctattgctaaaagtcctccaatgaagggggaatatttattaggctggattgctcactatagtgtcgggattatcttcgcattgagctttcttttaattgtaggttcgacttggctcgaccaccctcagttttactcagcactactgtttggtttggtcaccgttcttattcctttttttattatgcaaccagctatgggtagtggttttgcctcatcaaaaacacctcacccttttttgaactgtctgaaaagtttgctgaaccatagtgtttttggctgtggtttatatctcactgcaaaactatttcaaatttaaataaagggaaatttccatgaaaactgttgccattatttaccatagtcgccaaggccacacccaatttattgctcagcaaattcaaattggcgtcttgagccatcacaatattaaagcagatttactcaatgccgaggatcttatcgagcgtccagaaattcttatccaatatgatggattaatttggggatctcctacttatttaggtggtgtatcttccaagttaaaacagctcatggatgcaactggaccattatggaaaaaacaaagttttaaagggaaattagcagctgggtttaccgtttcatctcttcctgctggtgataaacaatccacactaatttcaatttttactttttgcatgcaacacggcatgttatgggtaggtaacccaattctaccagaacagcatcaaggtgttgcctatacacaagcagctaaccgactcggttcatggtcaggtttaatggctcaggctgaacatgctagtaatgcagatggttttgatgagggagatattaaaactgctcaacaatttggtgaaaattttgcattgaccttaaatgcttatcaagggacttaacaccatagttgaaaaatacctgtaagttaaaacgtacaaaatttggggtcattaacggatattcaacttgagtattttttcataacatataaatcatagagagacaggaagtctcattgaagaagaataagaacgcaggaagcggtagttgacaggagttagctacataaagctgaatacgaagaaacctcgacaggatgtcggggttttttcatttcaataatacaaaaatcttactttctgcttgggctgagcaacagaacttatattgatccaataaatacggctgaataccatcatttcatttgaaatttgattattggttttgtattttgcttacctcatctttagctcaagatcattttgcaccatcacaattacagcgccttagtctcaaattctttattattgcgttgatgacaataatgacgggatgtacaagtttaggccctaatagcggttcattttcttggcgctcaagtaagctttcgtctggcttacaaaaagcttattccgttccgccaagtacagcaaatcgcctatctccaatgattattcaaagcgctgatagatataatgttccaccgcttttattggcagccgtgatcaggcaagagtctagctataatagtaatgctcgctctcccaccggggctattgggttaacacaaattattcccagttattggcaacaaacttgtgctggtaacttgtatgatgaatctaccaacatccaatgtggtgcttatattttaaatcattactatcagacagcagatagctggttcaaagcgacagcatattataatgttggtccaacaggatatgaacgaagtttctggacacgccacaaagcaaaaaaatatgctcgatctgtgaaacgtcatcagaaaactttaaaaagtgctttataaattaagattaaataaaaaagcccatttattcatgggcttttttatatggttaattttattcgtcaaataaaccttcaaataaaacagaagataaatagcgttccccactatctggaagaataacaacaattgttttacctgcattttcaggacgttctgcaattttagccgctgctgccaatgcagcaccacttgaaatacccactaaaataccttcttgggtggcacactttctcgcccattgaattgcttcttcactactcactggtaagacttcatcaaccaaatctaaatcaagattctttggaataaaatttgctccaattccctgaattttatgcggtgcgggtgtaatgttctcaccattttttgtttgagtaataattggagactcagcaggttcaactgctactgagtacaatggcttattctgaacttgttcaaaataacgagaaatacccgtaatcgtacctcctgtacctacaccagctaccaagatatcaacttgcccacctgttgcttgccagatttctggtccagtcgtatcaacatgaatttgtggattagctgggttttcaaactgttgtggcaagaaataaacttctggctgttcagttgctaatcgtacagcttcatcaactgcacctttcattcccttcgctggttcggttaggactaaattagcaccgagtgcttttaacacttttctacgctcaaggctcatgcttgcaggcatagttaaagtaatggaataaccttttgccgccgctacgaacgccaatgcaataccagtattaccactggttggttcaacaatatgcatgccttcttttagcacaccacgcttttccgcatctgcaataagtgccgccccgatacgacatttcacagaaaaagctgggttacgactttctactttggctaatacaattgcatcagttttaatcaaacgattaatacgtactaaaggagtattaccaatagcttctgcattatttgaataaactgcgatacctaaattattgggtgttgggaattgtggatcagtagacatgttatatccttattagatttggaatgattctgaatcattataggcttgtcagttaaacaggaaagtagaaaaagtgaagtaaaataaaaaatggaatttacatcaaaaataaaaagatataaaaatagcaaaatcaaataattaaaatatatagtatccaatctaaagtaaactttcgctacagcattaaagcccaagtataattactaccaaagttcaccttctcgccaatctgcacaaatagtgtcctcttctgaactatttgatagctggtctttcatctgaatatttaaaggatatagcataatttcatactcatccgttagataactacaagtgttttgtttgatagataaatttcctttccaaacagtccatcctaatttttcataaaatgcttcatcttctggttgtaatgcagcaagcccatattccagatgagttaatgtgtctactaaatattttaataattgtgatgcaagccccttacctctcatcgtgtaatcagtggtcacatactctacataagcagttttcacatcggaactaccatttatggtaaaaactctatccgtccataaggcatgtgagacaatttgattgtttaatataccagcgacatgaatagctttttgcataaaagcatattgagtccaaggatcttcatcaaaagcagaaaaacataactcagcaatctgatgacgttgatttctatctagatcttgggctgcgataattttgaactgcatagatgaaaactcaatttgaactatttatagattaagtaaatattggaatattatgaaattattctttattccattattttagttttaataattcttcaaataattcttttctgattgctttcttgatataaaaaaacaccccaacctcttttgagattggggtgtttagaataatgagctggcgatgacttactctcacatgggtaatcccacactaccatcagcgctaagaggtttcacttctgagttcgggaagggatcaggtggttcactcttgctatggtcgccagcacaactgtttatggatacttgcttaggtcttacttgatgccgaagcgttttccaaatctgtaacagactgggctgattgaatcttactttatctgttcattttagctagaggtataactaaatcaagttgtcttgcatatttaagaatcgattgatgctttatatacaactgcttgggtgttgtatagtcaagcctcacgagcaattagtattggtcagcttcacatatcactatgcttccacatccaacctatcaacgtcctagtctcgaacggctctttagaggacataaagtcctagggaaatcttatcttgaggtaggcttcccgcttagatgctttcagcggttatcccttccgaacatagctacccggcgatgcgactggcgtcacaaccggtacaccagaggttcgtccactctggtcctctcgtactaggagcagatcctctcaaatttccagcgcccacggtagatagggaccgaactgtctcacgacgttctaaacccagctcgcgtacctctttaaatggcgaacagccatacccttgggacctgcttcagccccaggatgagatgagccgacatcgaggtgccaaacaccgccgtcgatatgaactcttgggcggtatcagcctgttatccccagagtaccttttatccgttgagcgatggcccttccatacagaaccaccggatcactaagacctactttcgtacctgctcgacttgtgggtctcgcagttaagcgcgcttttgcctttatactctacgcgtgatttccgaccacgctgagcgcaccttcgtactcctccgttactctttaggaggagaccgccccagtcaaactacccaccagacacggtcctcgtcccggatcacgggacagagttagaacctcaacattaccagggtggtatttcaaggacggctccactggaactagcgttccagcttcaaagcctcccacctatcctacacaagtaaggtcaaagttcagtgtcaagctgcagtaaaggttcacggggtctttccgtctagccgcgggtacactgcatcttcacagcgatttcgatttcactgagcctctgctggagacagcgccgccatcattatgccattcgtgcaggtcggaacttacccgacaaggaatttcgctaccttaggaccgttatagttacggccgccgtttactggggcttcgatcaagagcttcgcttacgctaaccccatcaattaaccttccagcaccgggcaggcatcacaccctatacgtccactttcgtgtttgcagagtgctatgtttttaataaacagttgcagcggcctggtttctgcggctgtcgtcagctcaggaagcgagttccatcaccaacaacagcgtaccttctcccgaagttacggtaccattttgcctagttccttcagcagagttctctcaagcgccttggtctactcgacctgaccacctgtgtcggtttcgggtacgattcctgtgtaactgaagcttagagacttttcctggaagcatggcatcaaccacttcgctgtacaagtacagcttgctatcagatctcagcatagagtaccccggatttgcctaagatacatgcctacatcctttcacctggacaaccaacgccaggctgatttagccttctccgtcctctcatcgcattacacagaagtaatggaatattaaccattttcccatcgactacgcctttcggcctcgccttaggggtcgactcacccagccccgattaacgttggactggaacccttggtctttcggcgaacgggtttttcacccgttttgtcgttactcacgtcagcattcgcacttctgatacctccagcatgcttctcaacacaccttcatcggcttacagaacgctcccctaccacgtatacaaagtatacatccgcagcttcggcacatagttttagccccgttacatcttccgcgcaggccgactcgactagtgagctattacgctttctttaaagggtggctgcttctaagccaacctcctagctgtctatgccttcccacatcgtttcccacttaactatgattttggggccttagctggcggtctggattgttttcctcttgactacggacgttagcacccgcagtctgtctcccggatagtactcataggtattcggagtttgcatcggtttggtaagtcgggatgaccccctagccgaaacagtgctctaccccctatggtattcgtccgaggcgctacctaaatagctttcggggagaaccagctatcaccaggcttgattagcctttcacccctatccacaagtcatcccctggcttttcaacgacagtgggttcggtcctccagttagtgttacccaaccttcaacctgctcatggatagatcgcctggtttcgggtctatacccagcaactaaacgccctattaagactcgatttctctacggctcccctatacggttaacctcgctactgaatataagtcgctgacccattatacaaaaggtacgcagtcacaccacgaaggtgctcccactgcttgtatgcatgcggtttcaggatctatttcactcccctcacaggggttcttttcgcctttccctcacggtactggttcactatcggtcagtcaggagtatttagccttggaggatggtccccccatattcagacaaggtttcacgtgcctcgccctactcgtcatcattatgtgtgccctttcgtgtacgggaatatcaccctctacgttcgcacttcccagagcgttccactaaaacacacataacttaatgggctgatccccgttcgctcgccgctactgagggaatctcaattgatttcttttcctaagggtactgagatgtttcacttcccctcgttcgccttgcaacactatgtattcatgttgcaatacctaccttaaagtaggtgggttcccccattcagacatctccggatcaaaggatatttgccgcctccccggagcttttcgcaggctatcacgtctttcatcgcctctgactgccaaggcatccaccacatgcacttaattacttgactatacaaccccaaacagtcgatgttacctacaagttagtaacttcaacatttcagtttagagcactgtgcacttaagcaccgtacagcttcaatctaaattcacataccaaaacgcttgattcagttaatttgctagttctcaattcatctagattaattgcttaacctaaactcttgagtgaacaatttatttcagactcaattttgccaatctgttaatgagttaatgtgtcttcgtcagatcacactaattaccgtgataatgaaatcacagaagttaataaaccaagatctcaatctttatttactaatttctgtaatccgaacttatcttaagttctggtggagactaggagagtcgaactcctgacctcctgcgtgcaaagcaggcgctctaccaactaagctaagtccccagcttacatcatcaatcatgtatcttttatctataacttcaaccagtcaaagtcatggtgggtctgacaagacttgaacttgtgaccccacgcttatcaagcgtgtgctctaaccaactgagctacagaccctcagatacatctatgaagaacaacttgttgtggattcttaccaatcgtcaatctttcgttaaggaggtgatccagccgcaggttcccctacggctaccttgttacgacttcaccccagtcatcggccacaccgtggtaaccgccctctttgcagttaggctagctacttctggtgcaacaaactcccatggtgtgacgggcggtgtgtacaaggcccgggaacgtattcaccgcggcattctgatccgcgattactagcgattccgacttcatggagtcgagttgcagactccaatccggactacgatcggctttttgagattagcatcacatcgctgtgtagcaaccctttgtaccgaccattgtagcacgtgtgtagccctggccgtaagggccatgatgacttgacgtcgtccccgccttcctccagtttgtcactggcagtatccttaaagttcccatccgaaatgctggcaagtaaggaaaagggttgcgctcgttgcgggacttaacccaacatctcacgacacgagctgacgacagccatgcagcacctgtatctagattcccgaaggcaccaatccatctctggaaagtttctagtatgtcaaggccaggtaaggttcttcgcgttgcatcgaattaaaccacatgctccaccgcttgtgcgggcccccgtcaattcatttgagttttagtcttgcgaccgtactccccaggcggtctacttatcgcgttagctgcgccactaaagcctcaaaggccccaacggctagtagacatcgtttacggcatggactaccagggtatctaatcctgtttgctccccatgctttcgtacctcagcgtcagtattaggccagatggctgccttcgccatcggtattcctccagatctctacgcatttcaccgctacacctggaattctaccatcctctcccatactctagctcaccagtatcgaatgcaattcccaagttaagctcggggatttcacatccgacttaataagccgcctacgcacgctttacgcccagtaaatccgattaacgctcgcaccctctgtattaccgcggctgctggcacagagttagccggtgcttattctgcgagtaacgtccactatctctaggtattaactaaagtagcctcctcctcgcttaaagtgctttacaaccataaggccttcttcacacacgcggcatggctggatcagggttccccccattgtccaatattccccactgctgcctcccgtaggagtctgggccgtgtctcagtcccagtgtggcggatcatcctctcagacccgctacagatcgtcgccttggtaggcctttaccccaccaactagctaatccgacttaggctcatctattagcgcaaggtccgaagatcccctgctttctcccgtaggacgtatgcggtattagcatccctttcgagatgttgtcccccactaataggcagattcctaagcattactcacccgtccgccgctaggtccggtagcaagctaccttcccccgctcgacttgcatgtgttaagcctgccgccagcgttcaatctgagccatgatcaaactcttcagttaaaatcattttgcaccttattatagacaaggtgccaattctggctcatcaattactgacttaaatttcgctcaaataaacttcgagtaatttaaaccaatcaatcaatgaaaattatttcgattaatcaatcagtaaaaatccacacaagttgttcttcaattctcttaatgatcttcttactggttcgtcaccagcaagctaggtcggctatattactcttaatctcttaaaagtcaacaggtaatttcgatatttttaaaacttattctctaaaccatctcatcatcaaattcatcacttaaagcaaccaatctaatcacaagtaactgtttttcaacaagtttctatctgaatcaccgccgatggatgtgcattatagaccatctcagtccctttgcaagcgaaaattaaaatttaatgactcgagcgtttatttttaaatcaataccaatattaagcctttgttttatattgataattattttaattttttatttttgacttaaataagccagtatcatgctcgataattctcgcttaagttgttgttctgagataagaaaattgttttggcttacataacgcatcatcgtaaaaagcgtactattaataattacaaaggacttatgcttcacctgttcgaagtcccattgatgaggatttctactgaatgtatatagccctacttcaaaaaaatgcttttctaaaatctgagcagcttgcgaatgactatagtcatgccagtgtttcagcacttctataaaaaatccatgatcggcttttaatgcattaaatcccaactctattgctaagggaatgagcagctctaaaggaatatttccttgtcgcacaactaattctttaagttgttgccccagcaattcgcttttacggcgcaatagttcttctatgatttgatctttattctcaaagtattggtaaatcgacccaacacttactccagatttctctgcaattttaggcgtcgtcgtatgtagtaatccatactgggcgatacactgctgtgtcgcctctaaaatatggtcaacaataatttttgaacgctgttgctgtggggcttttctcatcgtttttttattcgttaaatgcgaattgaatgcgaataattattcatattagcctatttattattcagttcaataagtaagtaacgatatgcaaatgattagcccgactcgacttgcttcttttaatgatatgcaagacagtaatttctttactcagtttttaaatatctgttgtggaaaacctgtacaaccaaactataaagaatatgtgtctttacaacatgctctttatgaaggggatattgaaatggataaggtgattgattgggttatgcaaagtcccaaagatcaccgaataatttttgagaagatattatttcaaggccgtgatgaattctctaagcctatacctactgaattagaaaatttctttaattacattgaacaaaaacctgattggttagaccaacaacaaattgatgaggctgttaaatttacccatcgtttaggaataaataatggttttattcttagagacttatccttaatggcgggatatttatatccggggtttaatcaacccctaattttaacgggtgcattaaagaaagaagcgggaacacgtttagcagaaaccacaaaatggtgggtggatattactgaacctcaagggctttttcgtttgagtgcaggttttacgtcaacgatttatgttcgctttattcatgcactcgttcgccggcaattaaaaaagtctagccgttgggatagtgagatttggggaattcctcttaatcaatttgatttagcaatgactaatttggcttttagcagtgtcgttttactcggtattagagctttaggtatatggccaacaaaacaagaggcaaagagttttttacatttctggcgttatgtcggctggttaatgggtattgatgaaaaatggcttattcagtctgaacctgagggttggaggttactttactggatgcagtttgctcatcctcgctccgatcacagcagtattgaattaggattgagcttgtcgaaagaaccttttgagagaaaatatctgcatttacgctctttacagcagaaacttgcttatcgacaacatttagaacttacccaattttttattggtaagaaaagaatgaaactactcggattgcctcagcaatctgcctcatggtttgcttattatttaattgtgcgtaatttactactttataatggcgcaaagctttcaccaaaagttgaaaagtttttatctaaatcaggccgtaatatacaaaaacttggcttaacgctttatcagaatcaaggtaaggcaaaaaccttagcaagtatgcatcaataattctggaatctaaaaaagcaaaaaatggaagcccgttatccagacttccattttcaactattaagaaccttattgagctgatgaactatgcatttcagcgtgattcatttgctcatgtgactccatcatctgcttctttttttgacttggcatgtagtcaggctcattgttgatggccaagtaaaaaataatcataaacaatacactcaagatagaagccacaataagtaacttccatccccaccaagactgttcaggcgataatttattagtcatttcatttctctcattaaattaataatttcagttctttaattcgctaaagcttattaaaacttcatactcatacgaacccagtaatttcttccgatattgttaaactgctcttcgctcgcaaatccaaagcctgcactacccgctttatttaagtgttcggtataggtcttatctaatacgttatcaatgccaacagagacatcaatatctttacgaaggttataacttccgtttaaagaaagtgttgaaaaacctttacttggttttaggtcatatcccacgatattaccttgatgtagactcacacggttttgctcagcaacagctcgccataacagacctaagttatatttgtcagccacatagcgaatatttaaacgaccttctaaaggtgaaatttgaggtagaggtttgtcatctgtggtgtttttgccccacgcatacatcgcactcaaatctgcctgaatacggtcagtgaattggtacccaatacccgcttctgcaccagcgatggttgcatcgacatttttggctcccgcagtaatatcatggctcatatcatgtccatccattcccatacttgggtgatggtggtaactcattaatatgtagtcatctactaaacctgcataggcagaagcccatgtgtttaaagcaccatgttgttgctgaaaacccaggtccaactgtagtgttttctcaggattcacaccgttaaaagtattggttgaacccgcattaccatgtttaggcgagaaaagttcccaataatcaggcatacgctctacataacctaaaccaatataactttttaggtcatgctcgggatgttgattttcccagcgaacaaatgcgcttggcaaagtcttttcaagcttcgtgttaaagccttttgcttgagaatcagcacgttcatcttcaactgtgactcgatctaaacgtgcacctgtaaccagcttattttgatcgttccattgataaccaagttcaccaaaagcgccgtatgattgaaaacgcatatcttgacgatatggaacattcatagaaggcattgttggcgatgacatgctgccaccatgtttattaaattgagagtcaacgcctgtgatcaaactccatttgttccattcagaagtcattgccaaacgtgagtttaatgtacggcgtgtcacttgcatggccattgcatttggcatcagcatggtcataccaccatgattcatttcaactaatggtggtgtacgcaagctaaagttatccataatatggtcgttatagctatagttcacctgcccttcaattttcttgatcacatcagtgatatttttcttttcaaaacgaagccctaaactttcacgcgcaaactgagaaccatccattgaacgtccagcataaagcgattcaccatcagattttccacccgtgatttcgacccacgtgttttcatctggagtaaagccaagcgctacatcagcattccactttttccatgctgatggcacggtattgccatcaccatcttgataactattcgattctgaacggttggcatttaaacggatatattttttctcatcgccaacagccgcttcaatattatggtcaatacgcccatatgaacctagcaagacactcgcttgaccgcgatagggtttttcagaagtaagcttttcaggctgacgttcaaatagaactgttgcagctgaaccagtattggcatattgaaccgtttgtggtcccttaatcacagaaatccggtcataactttctggtgaaatataagaagttggagcatccattcggtttgggcaggcacccaagttctctgtgccatccgttagaattttaatacgtgaaccaaacatacctcggaatgtcacatcaccatttgttccaccgctttgaattgaattaaaacccataatactttgcagatagtctgcgccatctgtagcaggtactggctgaatcggttgctttgggtctgcatgtacgatcagaccatttgcatcgttgccttgctgtgctgtaacaacaataggtgctaatgaatgaagtgtgttggtttcggcatcatttttttctgattcggcaaacactagacccgaatgagagacagcaaacatcgcaacccataaaggttgtagtaaaaatttagaatgtggcatttttatacgctctaaaacataaataaagtgatatcgaagtcagttaagaccccaacaaaaattgcttttatttatgcaaatagaggcggcgcacgtccttgcgggagtaggaaaagtcgctgtagcgcaaagtaaacatgccggaaagcttgttgatacgcgactaagcgaacttgtatacgaacaagcacctcttttatgccaaattcaggtggtaaaaccaaattggcataaacggtacaatattgacactgatggttcgcatcatggtgatcatgatggtcaggtacttgcgcctgttcgatatgatactggtgatgtgaatggtgcatggcatgtgacatggcttccgtctgtgcttttggtttaagcaaagcacgggtaatagtttcacagaccggagcaatttgatattgcttcggtaatagcggttgtagaaataccgcaatctgtaaaaatactgctgcacaggcaagcagcaaaccactacgaaaaaccaaaaatcacatccacactatattggtgtttgaaaaatattaacgttttaccgcaactttttcacgttcgcgttggcgaacaattttttcgactttttcacgcgcacgctgacgcttaagtggcgacaaataatccacaaacaatttgccatttaagtgatccatttcatgttggatacaaacagcgagaagtccgtcagcttctatctcaaatgcttgaccttcaaggttaattgcctcaattttcacgcgtgacgggcgatcaactttgtcgtatatttgtggcactgatagacagccttcttcgtacggctgcgtctcttcagtcagcggagttactttggggttaatgaaaaccataggttcatctttagattcagacaaatccatgacgataagctgaatatgacgatcgacctgagaagctgctaaaccgatacctggtgccgcatacatggtttcaaacatatctgctgcaagttgacgaatttcatcagtaacttcttcaacgggcttagcaatggtacgaagacggggatcaggaaaacttaaaataggtaataaggccatactgtcgtcctcacttatgccattgattgaaaaaccaaatgaaggaaatacttcatcgaaaaattgtgtgtaagccgcccattataacgcaactgcacacataatttttaggaattatcataatgaaaaaggtttttaacggcatggttaattttcatgccttggggataaagaagcatttacttgctttggcgctctgtacaggtgtcgcaatcggtacgatagcagaggttcatgcaaccagtccgaaccataatccaccctcccttaaaagtaatgcacccaatgtatatgttgtaaaacgtggggatactttatgggatatttcaggacattttctaaataaaccatggcgttggcctgaaatctgggcgagcaaccaacatgttaaaaatccacactggatctatccgggtgaccgattactattatgtagcctagatgggcgtcctttagtcggtaaagatgagggcgatggttgtgtcggtattattcgccgctatacaggtcaaaccacaaacctacaaccacaagttcgcgtcgaagcattaaataatagcgttccggttattccacttgaacatattaaacagtggttagagaacagtactattttaccagccgactcaattaccaacacaccttatattgttggtacagccgatcaacgtgtacttgcaggaaaaggccagactatttatgcacgaggacaaggcttaattaatgggcagcgttatgcagtctaccgagaaggtgaaccttactatttcacagacaataaaggtaaaaagcatagtttagggattgagttactacaggttgcttcaggtgttgcggtatcttctgaaaaagatattactacattagaactaacagatagttataacgctgaagtacgtcgtggtgatcgtgttatgcctgaagagcaagctactttgccaacattattttacccagtagatgcgaagcaagtgacggatggtggcaagattattcgtgtcatgggctcaattggtagagctgcaaaaaatagtgtagtgactttggatcgcggtacaactcagggcattcaagtaggtcaagtttttgatattactcaacaaggtgaatcaattcgcgaccctaaaactaaagaagtaattcaacttcctggccaacaaattggcagtctaatggtttttagaacttttgatcagctaagttatgcttatgttttagagagcgatttaccaattaaggttggttcaagcattcagccacctcaatttaatgattaatgctggatgtaccttttacaatgctcactcaactttcttcacaccactaccacacacttaaagtgtggtatttggtgcagcactctttagtcagctttaaaaaaattattgattattttggaaattgtgaaaaagccactcaacctgatggtttagcaaagtggtcctctctggggctacatgctaatcacttaaagcgtgtaaacgaatttcaaacgccccaaggtcaagcgcagtttgaacaacttgtacaacaagttcgtcagcatacagattttattttaacgccggatgactctggctatcccactcaattacttccttatacagattatccacctattatttttgggaaaggtcaagcgcaagctttattgcaacctcaaattgcgattgtcggtagccgaaagccaagcccacatggacgacaggtcgcttatgattttgcctattacttaagtgaaaagggctttttcattagtagcggtctggcttatggcattgatgaagccgctcatcaaggtgcatctactcatcaacgtaccattgcagtgacgggtacgggcttagacactacttatccagctcaaaataaaaaacttgcagaacatattttggctaaaaacggcgccattattactgagtttttaccgggtacaccaccattacaacaaaattttccacggagaaaccgaattgtcagcggtttgagtttaggcgttttggtggtagaagcgacattaaaaagcggctcactcatcacggccaataaagctgctgaacaaggtaaaaccgtattcgcgattccgggtcatatttatagcgagtttcatcaaggatgccatcaacttatccgtgaaggtgcaattttaatcgaccatcctgaacagattattgaggatcttgctttaccaacccaatggcaaagtcagcaacaaaatcaaactgaagaagctaatacgaatactccagaaattcctgagcatttgattgacctttatcagtctttagactgggtgggacaaaatattgaccagcttgtagttcaccataatattccagtttctgaactgacctcttcactaatggaactagaactactcggtttatgtatgcaacaatcagggctgtatttacgttgtcgttcttagtattagagcgcacaatagcgattctgtttgattgaaaggaaagtattaccatgattacgacctcagtgaccgaagcagccgaatgtttacaacaaggtcaagttttggcatatccaactgaggcagtctggggactaggctgtgatccatttaatgaacaagcttttcaaaaaattcttgaattgaaacagcgccctattgaaaagggcgtcattttattggctggccatattagtcaagtagaacatctactaacttccttaccgcaaactactcagcaagaaattattgattgctggacaaaccatcaaccctcagaaagagccacaacttggctattacctgctgatcaacacatcccctcatggattaaaggcgagcatcctcttgttgcagtacgtgtaacgacacatcctttatgtgtcgctttatgcaatgcttttcatggttttattgtatcgacgagtgccaaccctagtggacaagaacctgcacattctttacaagatgcctgccaatactttggttcacaattaaactatctcaatggtgatttaggccaaagccaacagccaagccgcatcattaacgccttaactggtgaagtgatacgtccttaatttcagacaaaaaaaagctcagttatatagggataactgagcataaaaaaggatgggtatataccacatccagagggtttggatatctctggaacgaaagaaaaattgcttaaaagagcatctttcgtagtggtcgctattatgtggcaagagacttaatgtgagaaatatattatttctctaaaaaaagcatgaaaagtgtagggaatttggcgtttttagcagttgaattaaaattatattaatatttttattggccttttttaatatttatgttacacaatcttttcataaatatatttataaatcatatagaaaagcttagattgataaaaaactggcatattttcatcactttttttaaaaatatgccatagtttttttatgattcttaattttgctctggcaaaagatctgattttttagaattaaccttcttttgtgccatgataatgcccaccagaatcataattccgccgaaggtgtgatatatggtccattgttcagataaccagatacttgcaataatggcggtgaacactggcacaagattcataaagatactggttctatttggcccaagttgttgtacggctaacatccaaactagcggcgcaatgagtgaagcaaatacaccggcataaattgcacttggcgcattttgtgcatttaaggcatccagaccaaaccagaaaattaaaggaagatggaacagcacggaaaacccaatctgaacgtataagcttgtcataattggaagtgagagctgccatttctttaagaaaactccataaaatgcatagaagaatacggcaataatcatcaatgcatcgccaaggtgcccgccaccacttaaaagcttattaatatttccttgggacataacgtatagcagaccagcaaaagacaaaatactgccaaaaactgcaaagcgattaggcacatcttttaaaatggcaagcgaaacaaagatcgtaaagatgggaataaatgcattcacaatccccatattggttgcactagtataatgggcagccgtataagccaagccttgataaagcaccatcccaaatgcacttaacacagcaagcttaggtaaatagggtattactagtcgtctttgtctccaaacagacaaaaacataaatggagtcaaaataataaaagcgattaaccaccgataaaagctgatacttaccggagaaatatagtccgagacatagcgggtgactacaatatttaaagaccaaatcagtactgccagaatgggaaaaataaatgcccatttgtgatatttcatgacctgactcatagtaatacaccaactacaaaagagactttattttgaagaatgtcttaataaattgaaatatcgtatttccgacattgatattgaacttaagacatcatttattttttaaaataatgtccaagctttcatggcatgttctaccactttatgtaattgttcggtacttgcaccatctctggcctgaatggtaagcccctgaataacagtcgcataaaaatcagtcatttcttgtagaggggcattagtaggcaaatcgccctgctctacaccttgttcgagacgttttaataatttttctttggtctttattcgcttatctaaaagattttgctgtacctcttgtgtggcatcagaacagttcatagcagcaactaccaacatacaacctgctggcttattaggttgaaccaatcgttttacattgtcataaagatataactcaaaagcaatttttgcagtttttgcttctaaaaatatcgtttcaataggacatgcttcatgagcgagatagtagtcaatacttttgtaaaacaaacctgccttatcgccaaaagcactgtataggctcggcgctgtaatttctaaagcatgtgttaagtcactaatagaggtggcttcatagccatgttcccaaaaaagtaacatagctttctctaacacttgctgctcatcaaagcatttagggcgtccacgcttcttttttaacgtgtcctcattaacaagatctgtttcatgcctatttgtcataaagatcacatctatttttataacaatcgttattaaattaattgacgttcaattttttatcaactattttattttcataatgatcgttagttaattataaatttgcctttcttcacttcgaatttagcaaagtaaggatttctttatggaccaatctactacctctaaagcacgacccatgacttccacacaagggagctggtttgctattttggctgttgccatcgcagcctttgccttggtaacgagtgaatttttacctgttggtgtcttaaatagcgttgcagccgatttacacatttctgtaggtacagcaggtcttattattacagtacccggcattatggcagcgattgcagcccctctattacccgtttcagtaaagcaactcgaccgtcgttatgtgcttattttactgactgctattatggtgattgccaataccattacggcttttgcagaaaactttcatgttttattattgagccgtttgattttagggatttcaattggtggcttctgggcaacagcaattgccttaagcggtaagctcgcacctgcaaatttacctatcgccaaagcaactgctgtagtaatggctggtgtaactttcgccactgtactaggtgtaccgattggaacatggttaagtgagttttatgggtggcgcagtgcctttggaattacagctgctatcggtcttgttgtattagtgcttcagcttattttcttaccaaaacttttaccagagtcagcaatacatattcgtgatttacctgcattattacgcacacctaaagcacgtagcggcatgcttattgttttattaattgggcttgctcacttctgtgcatacagttatttagcccctttctttaaaaatgtagccgggtttaatggcacaactattagctcattattattgctttacggaatagccggtatttttggaaatgcatttgcagggtacagtggtaatttaaatgttcgatataccttagctttcgttggaacatgttttgccattgtattctttggcttcccaatctttgctatccatgagtttggtgccattgtccttacagcattatggggcttcgcatttggtgccttccctacctctgccaatatttggatgtttgtacacgcacctcatgctgtagaaaaaggtatgccgctttttgttggtatgttccaagtcatgattgctacaggatcattattaggtggttatgtagttgatcattttaatgaaaatactttaatttatggggtattaagcttcgttgccttagctttaattagtacatttaccttagccaaaggtttaaacaatcccaaagcaacatgtgaaaattagaatattacttagagtagacccatgaaaaatgaggaccaacaattttctttattagagagtatagaagttcatgaatttctatacgaaaaagaagatattgttcgtcctcatgcttcactatggggagattttaattttagtttaaatggtattttagaaatacaggtagaagagcaaatatacttgtctcctccaagctatgggctttggattccccctcaaacggttcatcaatctacccatatcgatcatgaaattcattatatctgcattcgtttacaccctcggctttgctctattttaggagatatctgccgatgctttagtattcagcccttctttcgaaccttagttttacaaatattggaacagcaaaaacaaacggaaaagcctgaatatttagaacatcttttacaggttttattcgatcaattacaacaagcacccgcctattctcattatttaccacaaacaaggcatcctgttttactgccaattttagaaaagctttcagacccattactttttaatctctctttacagcagctacttcagaacttttctgtcagtgatcgtcatttattacgcttaagccaacaagaactacaactttcactatccgaatggcgtaatcgagccaaaattgtttacgccattcatcagatccgtcaaggaacaccgattaaacgcctagcatacgatttaggttatcaacacagctcaagttttatcgaattttttaaaagatatacaggccaaacacctgttcaaatcagaaataattagatagtaaaactgcttttgtatatctttttattttttgaacacgaatattattgcactactcaagaatagcagttaaaacaaatgcgttacttgatatcaattacaatcttcaggaaagactcatgactcaatctgtatatcatattccagtaaaagctatttcaggcgaaacggttgaccttgaccaatataaagggaaagttttattaatcgtaaacacagcgtctaaatgtggtttaactccacaatacgaaggcttagaaaagctgtatcaagcaaagaaagatcaaggtcttgaaatcttaggcttccctgcaaacaactttaaagaacaagaacctggttcggatgaagaaattcaacagttctgctcattaaactacgatgttcatttcccacttttctctaaaatctctgtagctggcgaagataaacatccactttatcaagcgctaacaacagctcaaccagaacgtattggagaaggccctttccgtgagcgcttagaaggtttaggtattcctactaaccctgcccctgaagtgttatggaatttcgagaaattcctagtaaataaaaacggtgaagttgttgcgcgttttgcacctaacttaacagcagacgatgaacaaattgtaaaagcagttgaagcagaattagctaaataatttttgcatcaaactaataaaaggagcgctatagcactcctttttattgtctactcaaaatgttgttcatttgcaacaataccttatttctacatattttatgcatatagtacctacttgcttcagttggtattgtttgtagttatgaaaaaagttttacaaggtgcatttttcccatttgtgatttttgcttcaggtatgttgttacttggatgtgatcagacacaagaccacgcaaaggaacaagaatccgttcagactaacgatcaaatatcagaccaagctgatgactctcaacaagaaatcacagctacacaaaataaaactgaattaaaaaatggtaatgttttttatatcgttcgtgatgccgctaatttacagttaaaggctggcgactatatcgaaaagctcaaggacactcaacttgacgttgaacaagctattcaagataaagatcagcatgagctaaaaacaactgtgacgactttgaaagcacagttagaaggtttaaaccaagctttgcttggtttagatatcagaagtcaggaagttgaaaatatccgtcaaagcctactacaggcaaaccagcaagctttaagcatgcctttattaaatgggaaattagagcaaattaatttcgaccaaattgaaaagcaacttaataccatccaaatggatatggtcaagctcgctgctatgattatggcaggagatgaaaaatcagattcaaaaactgattcttaattttctttttagcaataaaaaaagccacctttcggtggctttttcaatctcgaaccgcgtcttattgagcgcggtttttgattttacggatagtttcaagctgtgcagcggtttctgccaaggcagccaacgcagcagctgagtccaaatcactcttttggtttgcaagcaattgttcagcatttttacgtgcctctaaaattgcagcttcatccaaattgtcagcacggattgcagtatctgcaagaaccgtcacaacatgaggttgaacttctaaaacaccgccagatacatagacgatttcttctgtaccattttccaacagaacacgaatcgggcccggttgaagcaaggttacaagtggagcatgccctggcaaaataccaagttcaccacctgcacctttcgcgattaacatcgtcactgcgccagagtaaattgactctttaacacttacgacatcacattgcatagtcgccatgagatgatctccttaaattagagtttctcagctttagcaatcacttcgtcaataccaccaaccatatagaacgcttgttctgggatgtgatcgtattcaccagctaatagacctttaaagccacgaatcgtttctttaagtggtactaatttaccaggagcaccagtaaatacttcagctacgtggaatggttgagagaagaaacgttggattttacgcgcacggtaaacaaccaatttatcttcttctgccaattcatccatacccaagattgcgatgatgtctttaagctctttatagcgttgcaatacgttttgtactgcgcgcgcaatttcatagtgctcttgaccaacaactaatgggtctaactgacgtgaagttgagtcaagtggatcgatcgctggatagataccagaagatgcgatgtcacggctcaatactactgttgcgtctaagtgagcaaatgtagttgcaggcgatgggtctgttaagtcatcggcaggtacatatactgcttggatcgaagtgatcgaaccagatttagtagatgtaatacgctcttgaagaacacccatttcttctgcaagtgtaggttggtaacctaccgcagatggcatacgacctaacaatgctgatacttcagtacctgcaagtgtataacggtagatgttgtcgacgaataataatacgtcacgacctttaccgttttcgtctttttcatcacggaagtattcagccatagtcaaaccagttaacgctacgcgtaaacggttacctggtggctcgttcatctgaccgtagaccattgctactttgtcaagaacgttagaatctttcatttcgtgatagaagtcattaccttcacgagtacgctcaccaacaccagcaaacacagataaacctgagtgtgctttcgcgatgttgttgatcaattccatcatgttaacggttttaccaacaccagcaccaccgaataaaccaactttaccacctttcgcaaacgggcaaagtaagtcaattactttaataccagtttctaaaaggtcagtagaagctgcttgttcagcataagaaggcgcttgacggtgaatcggcaaacgttcttcagtcgcaacaggacctgcttcatcgataggacgacctaaaacgtccatgatacggccaagagtggctgtaccaactggaacagagatcggtgcgtttgtgctagttacagtaagaccacgtttaagaccttctgtagaacccattgcgatggtacgaacaacaccatcaccaagttgttgctgaacttctaaagtagtttcagtaccgtcaacttggagagcgtcatagatctttggaacgcttgtgcgctcaaactcgacgtcgataaccgcgccgatgatctgaatgatacgaccgctactcattgctgtctcctcaattcaaacttaataatgttaaacggcagcggcaccaccaacgatctcagagatttcctgagtaatcgcggcttgacgcagcttgttatagatgagttgtaagtctttgataagctgacctgcgttatctgtcgctgctttcattgcgaccatacgtgcagattgctcacatgcgacgttttcaatcacaccttgataaaccatagactcgatatagcgaactaataaaccatttagcaattcttctgcttctggttcatagatgtaatcccaaccataagtacggttgaggtcatcgccttcttctgctggtgctaaaggaacaagttgctcaactttaggcttttgtgtcattgcattgacgaaaccatttgatacgagatagatacgatctaattcgcctttatcaaatgcatcaagcataacttgcactgagccagttaactgttccaaactaggggcatcaccaatttgagtggttgcacccagcactttaccgccgtaattcttaaaaaacgaaaccgctttttgaccaatcaaagcaaattgaacttcaattgactgctcttgttgtgctttgacatgctgcacaactttcttgaacaagttaatgttcaaaccacctgccaaaccgcgatctgaagatacaatgatgtaaccaacacgcttaactgggcggtccaccatataacggtgtttgtattcagggtttgcttgtaccaagtgagcaattacacggcgcatattatcggcatacggacggccctgagccatgcgctcttgcgcacgacgcatttttgaagcagctaccatttgcatcgcgcgagtaatcttttgcgtgctcttgatactagctactttggcgcgaatttcttttaaatttgccatacgcttaacctagtattcgaaagccctttcgagcttccgaaggttgatccgtgaaccaaacttaactaaaactgaacttagtaagtttgagtcgctttaaagctttcaataccagctttgattgctgcttcgatgtctttgttgtagtcaccagtttcatcgatttgtttcatcaacggagcatattctgaacggaagtaagcaattaacgcagcatcaaagtctacgattttcttaacttctacgtcagccatatagccttcgttagatgcataaacagaaacagcttggtcagcaattgagtaaggagcatattgtttttgcttcattaactcagttacacgttgaccatgttcaagttgtttacgagttgcttcatcaaggtcagaagcaaactgagcaaacgcagccaattcacggtattgcgctaaagcggtacggataccaccagacaattttttgatgatcttagtttgagcagaaccaccaacacgagatacagagatacccgcgttcacagcaggacggatacctgcattgaataatgatgtttctaagaagatctgaccgtcagtaatcgaaattacgtttgttggtacgaatgcagatacgtcacctgcttgagtttcaataattggcaatgcagttaaagaaccagttttaccagttactgcgccattagtgaatttctcaacgtattcagcagatacacgtgaagcacgttcaagaagacgtgagtgaagatagaatacgtcacctggatacgcttcacgacctggtggacgacgtaaaagcaatgaaatttgacggtaagcaacagcttgcttagacaaatcatcataaatgataagagcatcttcaccgcggtcacggaagtattcacccattgtacagccagagtacggagctaaatactgcattgcagcaggatcagcagccgcagcagcgacaacagttgtatacgccatagcgccagtttcttctagcttacgtacaacgtttgcaattgttgattgtttttgaccaatcgcaacgtatacacatttaatgccagagtttttctgagcgataatcgcatcgatcgccattgctgttttaccagtttgacggtcaccaataatcaactcacgctgaccacgacccacaggaatcatggtatcaactgatttataaccagtttgaacaggttggtctacagattgacgccaaattacacctggtgctactttttcaacagcatcagttaattttgcatcaattgggcctttaccatcaattgggttacccaaagcatctacgacacggccaagaagttcaggaccaactggaacttctaaaacacgacctgtacaacgagctttttgaccttcttgaaggcttaggtagttacctaaaacaacggcacccactgaatcctgttctaggttcagtgccataccaaataagccgccgtcgaattcgatcatttcaccgtacattgcatcagcaagaccgtgaatacgcacgataccgtcggataccataacaatggtaccttcgtttttagcggtcgcgctggtgtccagatctccgatacgctgtttaatgagcgcactgatctcggatggattcagttgttgcattgcgctattcctcaatcttttattagttcagtcttcatcatttgcattatgcaagaagacgagtacgcattttttcaagcttgttaagcgcagaatcatctatcacttgatcgcctgcacgaattacaacacctgcaataagctcaggtttaacttcaactgaaacagttactgtgctgttaaaacgcttttctaaagcagatttcaacagttgctcttgttcagcagttaacgggaaagccgattcaatcacgacatccacattgttgttattctgtgatttaagctgttcatattctgctgcaatttcaggtaacaacactaatcgatcgttatctgcaagaagtgtcaaaaagttagacactgcttgagactgatcttcacctaaaactttagcaaaaagcttcacttgctccgcaggagtaagttcagggcgatttaaataagcggaaaatgcttcgtcttgcaccgcagcactgagcacttgtaacgcattcgaccaattgtctgttgcaccttgctcagaagcataagcaaatgctgctttggcatacggacgtgccaacgtcaagagttcagccataattcgcctcgcttaaagtttagcagccagctgagacagcatggcgttatgagcttctgcatcaacttgttggttcaggatcttttctgcaccagttactgccaaggcagctacttgttgacgtaattcttcgcgagcagaattgatttcttgatcaacagcttctttagcctgttgacgaatacgctcaccttcagccgcagcttgagtacgagcttcttcgatcaattgcgctgcacgacggttcgcttgttcgatcaattgagccgcttgtgctttagccgcatcaagctcttgctttacttgcgcttgtgcatcggcaaggtcagctttcgctttttctgctgcatttaagccatcagcgattttgcgctgacgctcactaatcgcattgattagtggtggccaaacaaacttcatgcagaatgcgacaaaaaacgcaaacgcaatcgcttgaccaatcaatgtgaggttgatattcattgcaattcctcaaatagtggatttaggaattaagctgattaacctacaaatggattagcgaagatgaagaacaagccaataccaacaccgatcataggcacagcatcaagaagacccgcgattaagaacatacgagtttgaagttgtggagctaattctggttgacgagcaacagcttctaaaaagcgaccacccaaaagaccaaaaccaatcgcagtacccaaagcaccgaaagcgatcaagatagcagatgcaattgcaactagacctaaagtgagttccatgaaaaattcctcagaggttaggttattaccaaattaaattaaaaaaattcagcccaaccatcgtttgacagttaggcaataccattaatgtttttcgcttgccatgctcaagtaaacgatggtaagcatcataaagatgaatgcctgcaacgtgattacaagaatgtggaagatcgcccaaggcacagataacgcccattgaatccagaacggcaataatgcgatcaggataaagatcaactcaccggcatacatgttaccgaatagtcggagagccaatgaaataggacgagcaaggaatgttaccaattccaaaatcaagttcactggaataagcaacgcttttgcaactggattacttgggttaaatgggttaagtgccaactcgcctacgaaaccgccaacacccttttcgcggatgctgtagaacaagataagtacaaacacagataaagacataccaagggtaatgtttggatctgtagatggaacgatcttgaagtaaacgtggtgagggtccataccaaatacgttagcacccacaaatgcagcaacttgaggaatccagtcaactgggatcaagtccattaagttcatgaggaaaatccacacgaaaatagtgagtgcaagtggagcgattaaacgtgatttgccatgaaaagtatcacggacacttgagtcaacaaactcaatgatcatttcaattgcagattggaattttgttggaacgccagcatttgcagctctcgcaactatccaaaataacaaacagaaaatcacaccaaggccaattgaccaacccattgaatccaagtgaattgcagtgaaccccatcgaatgagcttcttcagcagtctcagccaatttccatgtaccatctggcattttgccataggtcatattggtcaagtgatgcttgatatactctgtcgaagtgagggcatgttcttcagcagccataaatcacacctggtcaatgtcaattactaaaaagaagggaaacgaacatcggcgtactgtcgatatctcgccaccctccaaaaaatcttcaattcttcttgtttctatacccgtttttgtagacgtgacacccaaaaaggagcaacccacgacatcgcttgaacgagaataaaaccaaacagcaatgctaacggtgataaaggtttaacattgctcaaaatcaaaataaatccaacgatcatgattgcaaatttgcctaacatgcccctatacatgttagacagcacttgtttagatgctctcgcacctgcagttctgaaggattgccacgcaaaatagctcgtagcaagccagcagaccaatgcaccaagtgccgcacttaatgctgctgtcatgtcttttatgctccacgccacaagtgcggaaacagggatcatgcatgcttgtaagaagaccaaagcttttgctaatcgtcggtcaatcaagcgactagtttggctcatttttatccactcacagcataaatgcttgacaagtttagctgatgatcgcttttaatcgcaggcattatagagttacacccctgaacatgcaatcttttcccgactttagtcggggtttttcgtgacaggtggtgctgacgctacagtcagcctttgtttactttttatctcacttttgcgtatttaatacacatttatcggtttttatcgccagtttcttccatgctgttacaaaattatcttcattattcatactttcatcaacgggttggaaggtaatactacccagtttttgatattgcccttttgttgtaaaactttcagcaagtaaacacatctgagcttttggtcgactatcattaaggtactttatttgtgccgctgtaggagctacatgcggatcatccgttaaggcacccgcaaactttaagtttagcgaacgctccaaatattgataagcatcatgataagaccaatacggtttaccgttgcttgagctatcgtaagcttgagccgcctgcaacatatttcgtgcaaatgtattcgcattattccaatacttcgctttgttttcaggatgctgttgtgatcgtaaagctgcaataaaaaagccaatacgtactgcattgtttggttctaaccaaacatgcgtatccacagtatttggtaaagcagccccacgtgtattgcgctgcggcaaaatagaaagaataccgctatctaacaaagcaattgctttcttattgttacttagtaatttgttgagcggagcttcatgagcttttcctaaccagatcactaaagaagcatcattaattgctttacggtgtgccggtgttaactgtacatcatgcccactttgcccttgaagcaataactggggttcttcaactcctttggtaatttcttttgcaatcaaatagattgggtgcgtagagacaaccaaaccctgactccaacctaacgtactcataagagagaacagactgaaaacaaaaacgcggaacatgacagaccatcaattagtaatagctcgaagcatgttataatataacaaagttacaaaaatacctaagattaatcgaatgaagcaccgcttcatgctaatattccattaaaaatttgaggttatgtctatgagttcttgcatgcatgaacatcatgattctttgcatggtgtacatgatcaccataatgtcgcaagtcgtttagctgaagcagaaactttatgtactgcggtcggtgcacgccttacgcctttgcgtaaagaagttcttgaactcattttaaatgcttcaggtcctatgggtgcctatgacttattagcacgtattaaaagtcaaacagatcgccctgccgcccctcctactgtttatagaactttagactttttattagaaaagggtcttattcatcgcttaacatctattaatgcttatataccatgctgtcacccacgtgaaggtcatcaggctgcattcctgatttgtaccgaatgtcacacggttaaagaagcatcttcacaaggtctaacccaacaacttgaccaacttgcagctttagatgatttcgcagcacaacacagcattatagaaatttcggggaaatgccagcagtgccgcacagctcgctaaatcctgtattgattcaacttgaacaggtctctgttcatcgtgatcagcgggatatattaaaaaaagttgattttgctctgcatgaaaatgaaattgtgaccttaattggtcccaatggcgcaggtaaatcaactttaattaaagttctacttggtattttaaagccaagtagtggacgcgtcataagcaataaaaaactaaaaatggcttatgtgcctcagaaatttaatccatctcatagtcttcctttacgggtacaagatttattagatcttgaaaagtgtagccctgcccttcgtcaggaaattattcaagacaccggtattgccaaactacaacaatcaaaagttcagcaactttctggtggagagcgccaacgtgtactgctcgcacgtgctttacttagaaagccagatatcctcgttcttgatgaacccatgcaaggcttagatattcaatcagaagctgagctttatgaatatgtacgtagtctgccggagcgttatggttgtgccattttaattgtttcccatgatttacagtgggtcatgcagggaactcaacgcgttgtctgtttaaacaagcatatatgctgtagcggcttaccagaaagtattcagcagcatcctgaataccaagcaatattcggtactcagcgagttttctatcaacatcatcatgatcactgtgcgcatggtgacgctgcacacccctgccctcacaatagcagacctcacattcacccggaaccggaagcttaaaccatgatggaatggttacaattattgttacccgcatggattatgggaaccttattagtctttttgactgcaccacttggttgtctcatgctatggagacgtatgtctttttttgcagacaccatggcacatggaaccttacttggtgtagcaattgctggtgctttaagccttcctctctggcttggcgtagcaggtactgcaattttattagtcgctattttgtgggcactacatgacaatcgtttaccaaacgatgctttgcttgccctatgctcagcaacattactatgtagtggcctcctgtttattcaacatgttccaagtttaagaccggagcttttaagttatttgtttggtgacttactaagtattgattggccagacctacctgttttcacattaattattgcagtatcactggcaattctttatcgcttttggcagcctcaaattcaaattgccattgatccggatattgcaattagtgaaggtgtgaatgcgaaatggcaacgtctcatttttatgttattgctagccttatttacagtactagctttacgtgcagtaggttcacttttaatgggggcactactggttattccagcattgagcgctcgattactcgctcactcaccaaagcagatggttatttgggcctttgttttagctcaactcggtgtcagtgttggcctatggtcaagcgcagcacttaatatctcgactggcctcagtattgttttatgtatggcgttgagttttgcacttatctttatgcttcaaaaaatcaaaaatcaaactcaagcggcctaaatcaggctgcttgatggaccgtacttagcaataacgctgcacaactaaacatgacagcaaaaccacggttcaaatatttttgttgcttaggagaacgtagcaatcttaaaacttttgaagctagccctgtataaccagccattacaatcaaatcaatcgtaaccatagtagctgccataatcaggtattgtatccattgaggtttgcttaaatctaagaactgaggcaaaactgccaatagaaatacgatggctttaggattactgatattgaccacaaatccatttaacagcagagcagaaacagatttatcctttttttcgtgttgaatttctatgtcttttacaggtgctgtccactgtaaataagctaaatacaataaataggctaccccgaaccacttaacggcttgaaaagccaacggggtcgttgcgaatagaacacctacacccgcagctacaatcatgatttgaattaacaaggcgatttgcaaaccgatcgcattccaatagccatgtctaaagccataatttaagccgctcgacatagaagcaatagcccctgctcccggagaaatactaatgacccaacaggccaacatataagcaaaccaaacttgcaaagacatagcgaaaatagacaataaaagtgaaattataccgttttataaaactatcgtggcgataattcaaacaataaaatcaataaatagactactaacggctcttcgcatcaggcacaataattgaagctcatactaaattataattgaggagagatcttctaatgactgctcaatctgtcattttgccattaccatcagatcatgcccgttttattgttcttcgtttaaaagatttaacaattgctgaattaaaagaacaactcgaagctttattcgaaacacgtgaccgtctcattactcaacattcagacgcacaaattaaaacagcagtcgcttttggtccagaactttggaagcagctttacagccaatctcctgctggttttaaacaacttgaaccagaaaatggcgcattcaatatgccagtcgtaccagctgatgtgcttattcacattgccagtatgcgttctgatatctgttttgctttaagccaagcattttttgaagggattaaagataaagttgaagttctggatgagcgtgtatgcttccgttatttcgatggtcgcgatattactggctttatagatggtactgaaaaccctcaacttccagatgaccgcgcagaaactgctctcctcccagaaagtgctggagtatttgcagatggtagtttcatatttgcgcagcgctatgcacatgacttggaaaaatggaaaaaacttaaagtcgatgcacaagaaaatgtcatgggccgtaccaagcttgaatctattgaattagatgatgatgttaaaccggaaaatgcccatgtcgctcgtactgtcgttgaagatgaggaaggcgaagaaatggaaatcctacgtcacagcttaccttatggtgacggtcgaggtgatcaaggtttattcttcattgcttacactaaagacctgagcattattgatgcgatgttaaagcgcatgtttggtacaagtggggatggcattcatgaccgcttactgcacttcgtgacaccacttgacggggcatattactttgcaccaagtgaagaattattagaagaaattttagaggcttaaaagaaaaaaagaggagcttaagctcctcttttcacattctcattcttagaaaggaatacgtttatatttacggtattctggtttccagaacgattgatcaatcttctgcttaagcaaatcatcactaatagttacagccacaccatctgccattgcagcttttgccacttcaaatgcaatcactttagacacttgttgaatttcacctaaaggtggcaataaatcagcttgtggatctttcagcaacggtgaacagtctgctaaagcactacttgatgccatgagcatgttttctgtaacgcgtttagcgcctgatgctactacacctaaaccaataccagggaagatatatgagttgttgcactgcgaaatattataaagcttgccgtgatgatttacaggtgcaaatgggctacccgttgcaattaatgctttaccttcagtccattccacaatatccgccggtactgcttctacacgcgaagtcgggttagataacggcatcacaattggtcgttcacaattggcagccatggtcttaatgatttcttcagtaaataggcccggctgaccagaaacaccgattaatactgtaggcttggcatttttaacaacatcaagcagtgaaatcacttcttcaatattgccccattggtctactacttcagctttttgagctaacttacgttggaagtctaataggtttggctgattttcagtgatcaaaccaaaacgatctaccatgtaaacacgagcacgtgcttcagcatcggttagaccttctgaaaccatttgtgcaacgatttgctctgcaataccacaaccagctgaacctgcacctaagaaagcaattgtttggtcttttaattgtttacctgctgcacggcttgcagcaattaaactaccaacagaaaccgctgctgttccttgaatatcatcattgaaacaacaaattttatcgcgatatttttctaaaagtggcatcgcatttttttgtgcgaaatcttcaaactggatgagtgcttttggccagcgacgttttacagcttcaatcaccatatctacaaagtcataatactcatcaccactaatacgtggttgacgccatcccatgtagatcgggtcatttaataattgagggttattcgtccctacatcaattgtgattggcaatgtgtaagcagggctaataccaccacatgcggtatacagcgaaagtttcccaattggaatacccatgccgccaataccttggtcaccaagacctaaaatacgttcaccatctgtaatcacaatgactttgacattatttttattaacgttttgcaaaatatcatcaatcacatcacgatctggatatgaaatgaaaacaccacgatgacggcgatagatatcagagaaacgttgacatgcctcacccacagttggcgtgtaaataattggcatcatctcttcaagatgattttcaattaagtggtagaacagagtttcgttggtatcttggatattacgtaaatagatgtgcttattaatatcatcattgaaagcacaatactgctgataagagcgttggctttgctcttcgatagtttcaataatatgtggaagtaacccgtgtaagttaaagttacttctttcttcttgagtgaaagcggaccctttattcaaaaggggtaactctaaaagtgtatagcctgcataagggatataaaggggatgtttacttgggtgacctgatatcattgcctatctcattttccagcttagaactcagaaaagtacagtttcagcactctctaaagctcgttgtatgcgtaagcttaagactatttaatacaaaataggtattttaaactgtgatattgaaattgaatactatttagaaaaaacatataacaaaattaatattaaaaattaattacttacatttttcatctttttttaaattattctttcttaactctatatctgacttagaatcttatatttttaccctgtcttacatttccataaaaaataccaagtgttttactatcttataatttcaaaaatattacctaaaaagcctgtatttacgtatttttagaatttaatcatgttcattttttaatatttacaaaaaaaatagttctcggaaacttcaagaaagaaattaaatgaaagcgttaaatgcactcccctaactcataggaaatttgctatatttgacgtttttctgcgacatctattttcgattgatatgaatacggcaatacaagcagctctcgaccatgcagtgcaaacccttcagcaagaaggtgtgcttccttcggattggaataattcaagcaatttaacgcgcaccaaagaccgaagccatggcgactttgcttctaatattgccatgatcggctctaaagccgctggtatgaaaccacgcgatttagctgagaaaattctcgcagcgctaccagaagttgcagacatcagcaaagctgaaatcgcaggtcctggttttatcaatttctttttaaatgcagatcaacgttttgcaattcttgaccagattcaggctcaaaaagaaagctttggtcgtagccaatcaaatgcagctaaaaagattcaagttgaattcgtttctgcaaacccgacgtctagcctacacgtaggtcatggccgcggggctgcttatggtatgactgttgcaaacttgcttgaagcgacaggtgctaaagttgatcgcgaatattatgtaaatgatgctggccgtcaaatggatattttggcgacttctacttatttacgttatttggaattacttggacaaaaccttgtattccctaaaaatgcatatcaaggcgattacgttaaagaaatcgcacaaggcatcattgataaagatggcgatgcttacgttcgtgaagttgcgaatgtttataaagatgtaccagaagacgtgcaatatgctgaagagctagatagcgaaggcaacaaagtcgtattatctggcgacaaagaaaaacacattgacggtcttattgccaattcacaacaattattaggtgaaggctaccgagtattccatcaagccgcactccatgccattttagatgatattaaagatgaccttgctgacttcggcgtaacctttaaccaatggtttagtgaagcatctcttagcgcaaaaattgacgaagcgttagaaacacttgatcaacgcggcttcttatatgaaaaagatggcaacatctggtttaaatcgactgaatttggtgatgaaaaagaccgtgttgtgaagcgccgtaatggtcaaacaacttactttgcatctgacattgcatatcacttaaataaactacaacgtggttatactgaccttgttgatatttggggttctgaccaccacggttatatctctcgcgtaaaagctgcgattgatgcaatgggttatgactcgaaaaaattaactgttcttttagttcagttcgtaagcttatggcgcggtggtgagatggttcaaatgtcatctcgttcaggtcagttcgtgactttacgtgacttgcgtaaagaagtcggcaatgatgcagctcgtttctactacgtgatgcgtaaaagtgaacaacacattgactttgaccttgaccttgctgtttcacaaagtaaagacaatgcggtgtattatattcaatacgctcatgcacgtatttgccgtatgctagaaaaagcagcaagcactggcttacaatttgaagtaagtgctgctcgttcacatgctgcacgtttatcacttgatgcagaaactgaaattcttgctaaactggctgcatatccagacgttgtgttacgtgctgctaatgcatatgaaccacaccaagtaggtaactacttaaaagaattagctgcgctattccacggttggtacaatgaacacaaagttttaagtgatgatgctgaacttacacaagcgcgcttattactttcaatcaatgtacagcaagtattgcgcaatggcttagaattactcggtgtttctgcacctgaagccatgtaagttagtgttggggtgtttggtcaaagccatataccccttcatgttgtaagaaataatgctttgcaaggaaatctatctatgcgaagcgatgttttaaagtaaacgagaactaaactcgaaataaaacaatcaaaatacagaggaataatccacgtgtttggcaaaacgcaacgcggtgtatctgaaagacctaacaagcctaaaaagcctttaattcctaaatggttagggacacttgtcgctattttagcggtcttatgtatcgcagtaatgctcatgctttggaaaccgtggcaacctgtttcttcaaaaaaccagattacttctgagcactataaagaagaagaaaccaataaagattaccgcttttatgatctattgcctcaacagcaggtcactcctattccggaacaggcaattccagaaagtaaaaatcagggtactgccatgattgtagaagctcctagtacagctcaacctgccgcttctgaacctgcaagtgtaagcactgacgacacgactgactcaacagctgctatacctcaacaaccaaattatattttacaagttcgaagctatactgaccccgatcaagcagatgctcgacgtgcagaaatcattttaaatggcttatcggctgatgtaattaaaagctctgagaatggaaaaacttggtatcgtgttatttctggtccatatgacactcaagaagctgctctcgctgctcaacaaacattgcagcatagcggtattgactctattgtgattaaacgcagataaagattaagcaataaaaaaggaacaaatatttgttccttttcttttatatatcagcacaatttctttcgtttgaccctaaacctttctgtctcgctttttgaaaagctggtctttgctgaatccgatgtaagaatgcttgaatatgcggatatttaccttgaagacgtgactgtagagcctctagtggaaaactcatttgaatatctgcaaatgaaaaatcccctgcaaaatattcatgctcagccaaataattttctaaaaaactaatatggtctttcatacgtggacgaacaaaatttgctttaaccccttctgtaattttctttgccacaggctgaattagccaaggtacatgtttattgacgttgttcatgaccaaagtcatcactaataacggcataagtgagccttcggcatagtgcatccagtaaatatactgctgtaaatcctgagcttgcttaggtttaaactgctgcttttgatcatatcgctgctgcaaatactctaaaataacagccgattctgcgataacctgctcatcatctgtcaaaataggtgccttgccgagcggatgaatacatttcaatgtttctggtgctgaatagttcggaagacgctgataaaaatgaatatcataatccaagcctaactcttctaaagcccataaaatccgaaacgatcgcgaacattccaggtggtgtacactaatcatggtattgcctacttttatttttcttttttacataaaaaacagcatgtgaacatgctgttttattccatttgtgggatggatataaatcatccaccgcaacaaaatagcatttttatgctgtaacaagcacagtatgaatgtctaaactacgtaacaaagttttagtgactggggttttactgcatatggttaagattttttgctgaagttcttcgtttggaagttctttaaaaacaatacgacgctcgatatgttcttcatgctctcgattggtatgaaaatcaatttcaaccgagtattcaccaaaatcataacccttatgttttgcatacattcttaaagtaataagtgtacatgctgccagacttccggtaagcaaatcataaggtgcaggcccttgatcatgcccttctagcttttcaggctcatcacaaaagtattgatgacggccgctggtaatttcacctttccattgttctgcaagaggctttgctttactgctcgcaattactgctgtcattttgatgctctcatttgatctggaagaactggtgcttctaagcgggcacccacataatctggaatttcaccaaaacgcacgtcatgattaacccattgctcacgtgcttcttttaaatcgtccatcgtacgtgcaacgaaattccaccataataagatcggagtttcaaaaggttcaccaccgattaatagcacacggttccctttctttacttcaatctcaatttcgttcaaacctgtatctaatacaaccatattgtcagcagtaagttcatggccattcacatgagctacgccatctaatgccataaaaccatattcaaattcaggatttagtggaatacgtgtcttagtatcctgggtagcaatgagatcaacccctaataacggtgtatgaaccacaactggagaagtcgtctctaaatattcacccactagtacagtaaattccagaccgtctttttcaacaacaggaagatcgggataatgttcaaatttcggatccatgttgcgcttatggtccggtaaggcgatccagagctgcgcagcatgcatttgagtttcagtatcaggtgcaacctcggtatgagaaataccatgtcctgctgtcatcaaatttacctgtttagggcgaattaattgctttgaccctaaactatcggtatgcatcatggtcccttcaatcatccaagtgaaggtttgcaaaccaatatgtggatgaggtcctacatctaaaccattgccggcaggaaacgttactggtcctgcatgatctaaaaagcaccatgccccaatcattcttttttgtcgactaggtaaagcccgcttaatcaccgtcccctgtccaatttcggcagagcgaattggaaattcctgaataaattgattggcaaatttttcgcaatcctttgaatccgaaatatcgtaatcgttattattgctcatgatattactctcttttacctatgcttttgcaatgagtcgttatactgatcttaacaatacactcattattcaatatagtcttttagtaatacacagggtgctatgaatgagacaatcaatttttaataatcgaaaatctaaaaggatatggccaacttaaggtgattgggtcttaacttgttgttttaaatttttcataaattgtccaaactgtggcaagaattcttgaaacaatggatggtctcgattctctaacatgacttcactaaataactttagaccgactgcaaaagactttgtggtttgatcatcaaaaaattctgctttctttaacttttcaacaatctcgaaaatatcgtcatgattacctgtatagaactcgagccgttccgtataggtagaaacttcgcctttggcatcttttaaatgttgtaccgtaacgtgatattgatgctgtttcatacataaactctctattaaagttgatagtttttagataatttcaacctgtttaaggcccatttatagacgcccaatcgcaacagcagcctgatcaattttttcagcaatttgatagatctgctcttgcttcaactcagtggtattcaatttcaaacgtaaagccgtctttaagttttccatggcacggtgaatttcgattaattgatcattactgtgaatttcacgtctcaaacgcaatttctctaacaacccacttagcttgtcttggtgttcatttaaataagcttccccaaattccgtaatttgatattgtttacgctctacatctagcaagttaatgaggttcatttcttccaggctggttaaagtcggatagattgttcctgcacttggcgtatagccatcgcctaccaaatcacttatttctttaataatttcataaccatgcttagggctttgctgaataagatgaaggactaaaagtttcatacgtccagcttcaaaaagtctcccacgacgccccgaacggtgatggccgtgatgatggtcattatgttcagcatgatgatgttctgattgttgtctcatctttggaagttctctgatatacccaacttataaccattaagatatatcttaatgtatcttatatcaagaaaaagtaataaaagccaatctattaatttgataattattaaaattaatattattttctttaaatgctaagtaataaaaaaagattgcttaagcactcttatatacccgtatgtttagtaaagtcggtaaaaaagccagaatctaaaaaattattatgcgatcaaatttcttttctgctcaaactgctcttcaatttttgaactcagaaaattaacaataggctgcaaagcataatgttcctcttgccaattttgtttgcctatttcccctctatattcctgtataagccgctgcaatacgaatttctgctcaggaggaagctgaggcataacccatcgagctgcattgtcttttgaagcaatatccttcatgactaaactaaaatagatccggcataaagctaaaatctggtttctttcatctgcatcctcatcccaatgagctacaatttcgggataagtatcagacattgcttgccatagttcttgatcagaaatttcaggtgcccattggtccaaagctggaccaaataaaactgtatgatgaaatctcgcttttctaagcaatatactaatatctgggtctttctgggaacttaatgttccaccttctttaagttcttcacgtagccattcaccaaactgcatttcataacttaaaggataatttccagactgaatctcatcttttaataaaatagtaacttctaatggtctttgtaattccccaacaggctgtgaaatttttagtaattcttgtgcaagctgctcgcgtaaagcagatgttaatggttgagtaaccacgaccagaacatcaaggtcactttctggtcctaaaccaccatcaacagctgaaccataaagatagattgcaaataatgatttcgctaaaagttgctgtaatttttcttgtagatattctaactgaatgaaatcagacatctctcacctccttcggaagaaacagatataaaaaaggcaggatttaatcctgccttttcatttgattattcccactcaatcgttgctggtggtttagatgacacgtcgtataccacacgtgatacatctttaatttcgttcataatgcgtgttgagattttatcaaccaattcgtatggtaaatgtgcaaaacgagctgtcataaagtcaactgtttcaactgcacgaagcgcaatcacccatgcatagcgacggccatcaccgactacacctactgatttaacaggttggaatacagcaaatgcttgagctgttttgtcataccagccgctgtcacgaagctcttgcataaagatatcatcagcaagacgaagaatatctgcatattcttttttcacttcacccaaaatacgaacgcctaaacctgggcccgggaatggatgacggtagatcatgctatgtggcaagccaagtgtagtacctaatttacgtacttcatctttaaacaaatcacgtaaaggctcaaccaattcaaatgctaaatcgtctggtaaaccacccacattgtggtgagatttaataacgtgtgctttaccttgtttgcttgcagcagattcaattacgtctgggtaaattgtaccttgcgccaagaatttcacgccatcaagtttacgtgcttcttcagcaaatacttcaataaactcacgaccaataattttacgctttgcttcaggatcggtaacgccagctagggcatttaagaagcgcgcctctgcatctgcacgaataacacgaatacccatgttttcagcaaacatttgcatcacttggtcaccttcgtttaaacgaagtaaaccattatcaacaaatacacatgttaattggtcaccaatcgctttgtgtaaaagcgcagcaacaacagatgagtcaacaccaccagaaagacctaaaagtactttctcattaccaatttgctcacgtaactgctctacacgcaaatcgatgatgtgttcaggtgtccaaaggccaccacatccacaaattttgtgaacgaaattagaaagtagctcttcaccttttgccgtgtgtgttacttctgggtggaactgaacaccgtaaaaacggcgtgtttcatcacttacagcagcaactggacagcttggtgtgcttgcagtaatcgtaaaaccttctggaatctggctcactttgtcgccgtggctcatccaaacgtgtagttggttttcgcggtcttgtaagttgccaataagttggtcacgtttaacgatatcaacttcggcataaccaaactcatgtacagtacccggctcaactttaccgcctaactgttcagacatggtttgtaaaccatagcaaatacccaatactggaacgcctaattcaaacaccacttgcggtgcgcgagggctgccctcttcatgcacactctcaggtccacctgataaaatgataccgtttggcttaaaagcacgaatgtcttcttcagacatatcaaaggcatacatttcagagtaaacaccagcttcacgtacacgacgtgcaatgagctgactatattgagagccgaaatccaggatcaggatacgatcttcagtaatttgagtattggtagtcatgacaaaccactaaatggcaaaagaattaagcgcgccattttaacatttttcacgcttcgacgcaccgcaaatcatcatatatcttatttttttcatattagaatcattttaatagttagaataatcgatataaaatattatttatttatatttatcaacaccctaaaagttactttagaacttcatgcacattgataaattcatcacattctatgcaacatcataatgaatttgatgttaagatgacccgataaaacaggcattaccatggaaaggtaaataccattaagcgatatttgtctgaccttaaacagttatccgttttttatggcttgttgccccatatcaaaatcaatagaaatctaaggaacaacaatgcttcaaactatgattgcagatttccagcaacatttttggttgtatgtctctattcctttcatgagtggtttaattggctatgtcactaaagtgattgccattcaaatgatgttttcaccacttgaatttaaaggtattaaaccgttttttggctggcaaggtattgtgcctcgtaaagccgaaaaaatggcaacgactgctgtagagcttatgacggctaagctcattaagcccgaagaaatttttgctcgccttgacccaaagcgtattgctaaagaaattgaaaaaccattaatggcagcagcagaagatattacccgtgaggttgcccaagaatatcaaccaggcttatgggaaggcatgcctgagtttgcccgccaaagactgatccgcagagtgcaatcaaaagccccggaaattgtcgagcacatcatgagtgaagtgcaacgtgacgtaaatcgatattttgatattaaacatttggtcattagtaatttacttaaagacaaacgcctactgaacaatatttttaaacgtgtaggcaaacaagagtttaagtttttcagtaacgttggttttgtatttggttttggtattggtgtgatccagatgctctgctggattgtcacacaaggaaaatatccttggatgctacctctgtttggcggttttgtaggtttttttagtgactggattgccctacaaatgatgtttagacccctctatccgaaaaaaatattgggctatacatggcaaggcctatttattaaacgtcaaaatgaagtggcagctgactatgcagctttaatttccaaacaacttttgacttcacgccatatgatggaagagttgttttcaggtactcactctgcacgtgttattgagctggttaaccgtcatgtcaaacaggaaattgacatgcaagcaggtgtaatccgcccactcgttgtttatgcaattggtggagaaaaataccagaatatgaaaactcaggttgcggaacgtatcatgcagcaacttccagagaccatgaaatatgttgagtcttatgcagaagacgccatgaatattcgcaataccctgattgagcgtatgcagaaattaacgccttcggaatttgaaggtatgctacgtccagcctttaaagaagatgagtgggcactcattgcagtaggcgcggtacttggttttgttgttggtgagctacaaatccagtttatgctttaatttttaaatataaaaaaaccggatgaatgaatcatccggtttttattttgctttagatattatttttcaattgcatggtcgaggctaatacgtccagcaccgtgaagcatcaagaagaataaaccacctgccattgcaagatttttcataaagtggatgccattgttatattgtgctgctgcatcagccccaccttggtgaaataagaacgcagttaagatgctaaagatcccaagaccaaaagctgcgaaacgtgcttggaaaccaaataacaacgctaaaccaccaccgaactcaaccagaataactaatggtagaagtccacctggaacacccattgcttccatatatcctgcagttgctgcataaccggtaattttcccccaaccagcagcaagaaagatataagcgataagaagacgagcaacaaggctaataaaactgtctgcgcctggttgcgtcacgatatttttgaccaccacatttggattaaacatattgccacctttatttaatgcttatttgttgatgaactcattctaggtttgggacattgataattaaatactcaaaatccatatatatcgttgcacaaataggatgatcaatttgtatatttttgatgttttatactgactttctataggctcgctgctaggatttgagcacggtttaccacttaatcatctcatggaacttcttgattttattctacacgttgatcaacatctcgccgaatttatcacaaattacgggacgtggatttatggcattttatttttaattatttttgtcgaaaccggtttagtggttatgccgttcttaccgggtgacagcttactgttcgcagcaggtgctttagcggcttctacaggcacaatggacccttggttactgggcattctactcttcattgccgcggttttaggcgatacagtgaactatcatattgggcgttttatcggtccacgtgtatttgagatgaattcacgctttattaataagcaacatttaattaagactcatgaattcttcgcccgtcatggtggcaagactattatttttgcacgtttcattccatttgctcgtacctttgcacctttcgttgctggcgctggcagcatgaattataagtttttcttaacttataacgtaattggcgcattctgttgggtagcttcttttgtcactttaggctatctcttcggtggacatccacttgtaaaagataactttacccaccttatttttggcatcattattattagtattttaccgggtgtgatcggcttcatacgtcaaaagctaaaaaatcgaaaagctaacgtttaaaagagcaattagaaaaaacggaataccaccggaagcatacataaaataagtaacatggccgatcctttatatagatgatcggcctttatttttttcattgatcccgtcaataaagcacgtccgaaaaacatccagaaacttgctgctggaataagaatcaaagtaaaagcagccagaaccatgagaaaattctcaggcgaattccatgtttcagcggggaaaatacctgcggcaaaaagtaaagacttaggattttttaaagttgagaagaataattgacgtgggcgaatattacgatgattttgactaaattgttgtaaatgcgtggttttccataaacggaatgccatccagaatacatataatacgctagtgatgtgcaaaataagcagtagtgcaggccaaaccggatctgccaaatgaatgaacactgcccaaaaactaatgccataagcgtagcccaaccattccattggaataagccagaatgttttagataaaccttgtgagtgagcggcggttgcaagtaatgcgtttgtcgggcccggaataagtaaaacagccaacattgctaatacaaaaaaccagctctcaatcatataatttccacattagtaaagatgcggcaacattaaacgaaatgggcaaaatatagcaagtttagagcgtattccgattagaaagaatacaagttattctaaggcttatttttaaaaaattattgatttataataattttgttatgaaacattttgctaaactttattcatcacaatatgcaattagttagcatattgtgatgcaaaactgatgattaattcgtctttttccgaacaataattggacaattcttaaactgagcagcctgaacaatggcttcttgttgacctaatacacgtgaaagttcggtgtttttggttgaagaagattgtcccatattgacagagatggatgggccgaatccccaaccgcctcgtccccagccaccgccaagcccaagtccaacacccatacctgtactttttggtgtctgtacaccattgtcgatatattgttgaatacggttatattcactttgtagctgctggcaactcaaagattgatactgcgtcggagacacataagtcggttttaccgttgtagcacaagcgcccaatagtaaagtggccgctgccaaaggcacaatatataagcctttcatcatttttctcttatcgttttggttcaatttcgctgaacaatgcctcataagcctgagtcaatttgtgttctggcgctaagtgagccaaaggtaaatttttctgatgtgattctttcatcaaaatcgaaggcggtaacatgctattgagcacgggtaacccttcatcttttaactgttgaaccacttcccgaggtagttttgcttgggactggaactgattcaccacaattccttcaatttccaagcgatcattatgatcatcttgcgtttcgagaacattttcaatcaatgtttgtaaagcacgctttgaaaagacatcacagtcgaaaggaatcagaaccttatctgctgcaattaatgcagacaatgtgaaaaagttaaaggctggaggtgtatcaatataaatgcggtcatagcgcccaaccaagctttgaatagagtcacgcaatttataaattttatgtttgctttcaagtgcatgttcaagagcaccaagcgtagggctagcgggaagcacatctaattttgcaaaggatgtagagtgtacaaaactgtcgagatctttgttgcgtggagcttttagaattgagcccagtgcattcccaattaaacctttttgttgattatttcccaacacatcttcaaagaagttttcaatatttggttctaaaactgctttatcagcagcgtatgttgcttcttcgcctaaaaggtattggcttgagttggcttgaggatcaagatcgataaccaaggtccttaagccatgtttggcactaatggcagccaaatttacagtaatacttgatttccctacaccgcctttttggttaaacaccacacgagttagcatgtttccctctacatatttttttactgtatgcagtttaacctagagcttacgcaaaaagacaaagaatgtagaacaattaagcaaaaacaggtttcactattaccaaaataataatggcaacaaatgcgattgcactaatgaccaaacccgcacggcgctgagctagtaaaatagtgtcatcctttttaaaggctttcattaaagatgataagagcactaaaaataagataattttagcgtagaaccatggctggacctgaaagttcttcatcaccagtaaaattgccccggtaatgaaaaccacggtaaatgacaaatgctgtaaagcaactaaaactttacgccctgctgggttaggttgttcaccttgtacaccaataaatagtgtagaagcgcgtaatacaaaaaccataagtgcggctgctaccgcagtcatatggataattttagtgagtaaatgtgcatccataaactaagcccttagcttttaggtgcatgtgcacattctggactcgctggcgcttggccttgccactcacttggtaaataagcgtggattgctaaagcatgaatttgtcctggattcattaaatcagaagccaaggcataaactttttgatgacgttgaaccaaacgcaagccgttaaattcttcactcaccacaatcactttaaagtgggattctttaccaggaaaataaccaccgtggccggcagactcattaatgacttctaaatggctaggtgcaagggtctgtaaccgttcaatcaactgttgttcaaggctcatagcttttccttttacgattattcgtatatttagacctagtataccctgtctacacacaaacaaaagttgctcttgtatgctttgacttcaaacaaaatgtctatttattcggcaacttatcaataaaaataactctaaatgctcatttctgtttttattttatgcaatcagcataattatttgcataaagttgttgacccttgttttgcttaatgtattataagcggcacgcgggaatagctcagttggtagagcataaccttgccaaggttggggtcgcgagttcgagtctcgtttcccgctccagattggttttttttgagaaagttttagtaaaaactgctcatacatgcgggaatagctcagttggtagagcataaccttgccaaggttggggtcgcgagttcgagtctcgtttcccgctccaaattcaaaaggcacttatcgaaaggtaagtgcctttttcttttgatctgtttatatatttagaatttcaaaatcactcattgccttgatttaagttagttatgttcgcaaggttctagagttattcgatgtgtagatatataaggtaataattgaaaacaatctatattaaagctttctaggcaatgactctgctgtaaacatagggagaagataaaactataattatagatataacttttaaaatgatactgctcagttctttgaacatcattattggttaaatcgcaaaattgtatatgttcaggtgatacatgaaagttgagcttctttaaatgacggctcattccttcaccagtacatttaatataggattcttttaaggtccatatttgaaaaaaacgttgatatacactagttggattagtccattcattttgctgaatccattcaatttcacttggcgctaacacgctatcgacacgcctccattcgaactcatggttcattctttcgacatcgactcctatttctcctttttctgtcacagcaaagacaataaggtccgcagagtgactaagattaaaataaatagccttattgcctcgtacaaaaggtttgccgttaggttgtaattgaatgatgacctcatgaggcaagatacccaacttatctgataaaacagacttcattaacacacgagaaattaagaaaagtcgtgcagcatgagaatgatattgatcatatctcagcttttctgtcgcattgagaaagctgagataatgactcaatataagatggttgtttggtacccgtgaaattgggcaaacataaacctgtacgttcgctacatcagacatcactaagctgtgctgtagtgctgatgtactttgtcagaaccggtgtaaggtaatcataaaccgcttctacatgggtaacgtgtggattatgacctgcgccagcgatgatatgtacaggaatctcaggactgattggagtaacaattggatctttctctcccacaataatctcgattttagatcgaagctcagaaagcaaagctgtctgtgctgcgcgctgctgcggcaaattaatgtggtgcatgtactcactaatatgcttagacactgacatgcggcgtagtgaatccatcgcatatctcactgacagattttgttgcccctctggatgtaaatctttagcaatcacatctttcggcacaaaacggaaaatgagtttagatatcgcttgtatctgaaacatttttgcagcctgtgcctgaacaaaataaggcgatataaggataaggcgtgcaactttatctggatatttctttgcaagatttaatgcaaaaagacatcctaatgagtgggcaatcaccacactatttggtgccaaaagctctgccgcagtatcaataaattgatggttattatcttccatcatttcataactacctgaacgcccaagtcccggtaagtccatcatagcgacctgatcataagtaattttattgatgattggagaccaacatgcactatcaaatggaataccgtgtaaaaataatgcagaagctttttctgaaccaactggctgtttagtataaatttctgtccaatagcggttctgatagctaaaagaattaggtgttgttacgtgcatacgaccaaaacgtgtaaacaccaagcgatcaatccagcgagaaaaataaggcatgatactgatcaggtctgcgatgcccatcttcgccgccatcgcctctgccccagcaacatggtaatgctcggtagaaatgaaagaaagttgctctttagaaccgtcaagtaatacctctggtaatttctcgagcaaaactttaggtatttgtaaatgtggtgagctaactcccaaatgctcagcagctaggtgaactaggcgatgaaatttgggtgtcgcaggatcaagcagcatatactcctgagcaatggtctcaggataagatatcgttcggatcagaaagctcacaatatactgcatattgcatagaggtaggaatgtgtcacgaccacctggtaatgccagtaaacgtccctgatagagcttatcaatcatgtccgcaataccaatatattgcatatcgccataattataaaaaccatcaatgactgtcgccggatttattgcagtccatggcacatttaaacgcttacaggcctcaatgaaagcttgatgccctagaatttttgaagcctcataaccaccatgtttgcaatacaactcatcagccgattcttgcggcggcgcagccacacgatacccgccaatccagataaatcgctcaagctgcttcaatgttgcagcccattcaatcaacgccagccctgacttaatattggtacgctcagcttcagctttgctaatgccccaattaaatgatgctgcgagatgataaattacatggatttttgtctgggcgtccgataatagagagtccagcttaaaatcgcggcttaaatcatattcaacaaaagatatagatggatcaaccagcccttgggttgcaatgaaacctaatagcttatctttcttggttgcggcattacgcagcgcagcaatcacctgatgaccttcacgcagaagttcaacgatcaatctgctgccaataaaacctgctgcacctgttactaatatggtcttccgtgaaaaattatctttttttgcgttatttaaattatccataaatcaccttattaggtgctgggcactccagcattgttttgaagcgagttatcttaaaagttatatcgaacctgggcatacaccagactgttatctctaaattgtcctagtaccgtatcatttctgccccagaagcgatctccacctgcatttaactgccagtgatcattgaggttgtagttaatacgtactctcaacaactcattaggctctggtgcaaaatagaatcctgtaaactctaactttaaattgtcattcaataggttaagcgcataacgcagcatagctccatactgatcttgctcatattggtcgctgattgtttgctgataacggtagactgtactcaatgatggatttgttaggctatcggcagatttaaagtcttctgtatgcttgtacacgcctactaaactcagcgtagaattttttaatgaccattccggccccataactatagttaaattatttttcttatgggtaagatcttcgctgccattcgagtcagtctttgtatatgcagcttcaccgcgccatacgagatcgttatggttataactgaaatcaaacccatagacagacataggattatttttcagttgcaatgtggcctcccctgttggagacgctgaaagaactgacagatcaggcatatgatctaaacctgagaaatacgatgcccctacatctagaccatctacagaataatcccaacgcattgcaaatgcaggacggctcttacggtctatgtcatactgaacaccagcaatctgacgcaatggaatcacatctgaacgactacgcggataccacaatgccgtccatttattggttccagattcaggaatataagtcaatttgattgcatcatttcctagacgttgatctgtctcgtctggtactagacgcgtatagtcacggggcgataggttatccgttgggttaattccatccgctctcccccagacgacaatctgacgtcctaagtcgagataaaacgtctgatcccagttataagaggcatacaactcacgtaagttacgatttaccttactcacctgatctgggtttacagtgtggtccgtttcgtctgaaacccctatgtcgtaatgcagcttaaatgcagggttaaacttgagcgtaccattggaccagaaacttgcttgcccaatgttttttaacgaacttaaatcacgatctgatgaccacacatcgagtctagctgagttttggctcacaaaactcatttcgctgtcatctgcataagtatgctgcagtagcataaagctactgcagcatacaaatacccaataggcaccttgcgtcatttctcaagactctgcggtgagaaaagcttatcggacaaggttttttctgccgcaaaatcattgacgatcacttgcgtcatatgttgagtttgcagattcttcgccatagatttcatggcttgccatcttggtttcactttgccgtaaggacggatatcggtgaattcaatatgttttaatggtttgcctgctgtatcccaaatatcgatggttgctgtaacaaagttgtctttgagtatgcacatacgacgtttgctataaccaaaatcactcttcaccgtattattaattggtgttgcttcaatcatgtagcaatctttgccattaaatttaccatctgccagtttcgtatacttccagtcactgagcttatagccaaggacatcaccataactaaagtccgtaccaataaaagcatcacctttattcgctgaggcaagacggcgtacttttttcaatgcaggtaaatagacgaacatgctatcgctgccttttgcattttcaattaacagtgtcgtggttccttggacatctgctggcgagataaactcagtcaaacgcatgttgttctgcgtatttccagcaagcttagtcatatttttagttaaacgtacacgttgctcgccatttttagaggtcaaaataaatttggcactagccgttgaagacaagaacttagaggcatcatcactacgattaacaatatcttgaacttcatctgcatgagatgttttaggcatcgacattgtgagcgctgtacccaacaaaaggcttgtcaccacagtttgtgcaacaggtatgctcttcttctttgaagaaaagataaaacgaggttttaatattagaatcattgtaggtaccataattaaggttgcaaatacactgaaaagcatcgcaatcacaataaacatcgcgagccattgatgaacgtggaagccttgtgataaggacaatacgccatacccaccggcaaccgcagtcgcgacaaaaagagaagccttaccagcagtacttaaagttttacgaatagcgtctttgatatcgccgccttcttcgcgcaagatttcacgcaagcgatagaggaagtagatggcataatccgcaccaatacctacagccatggccgagatgagagagttcggaatattgagcggaatatcgagccagcccatcacgccaaagatggcaagaattgagaacagaagtggagtcagaacaatcagtccagctgaaatcgaacggaaaaccaatgctgaaataaagaatacggcaaatgaaatttgtagaatgttcatgagcttgccgtgaaccatcgtttcagtcaaagcaatggtctgcgtcacatcaccaccaaagctcactacagccttgtcgcccaattgacccgccatatacgtttttagcgactcaaggatttctttaatgcgatgattactgccagttttcagaagaatcgtgatcttggcatagcgttgagtggtatcaatgtatgaatcaaaatccgtcggctcaccagacattgaatacagcagcagatactgagcaacgacatctttggttgcaggaacctgaaatgcttgtggctgatcagcattcattgcctgattcattcgtttgatatagtccacgatagagatggttttaccgacctctggaattgagttcgcgaacttttcagtattatcaatcgcttttaagatttcaggattttcaataccatcacgaaccttcgtatcaaccataatataaaggctgtttgtgccaccgagagactgattcaagaatctgtcatcttgttgcattggtaagtcacgagagaagaaattacggctatcgttatccaccacaatacggctcgtgccaatagcaaggaagatgcccattgccgcaatcgcagtcattaacatcattcgcggacgaactgacaaaatgacatcaccaatacggtttggaatccaatcccaaattggcaagcctttgcgtttgaccttcacaaccgaaggtggtggcaacattgagcggagtgccggaataaaagtcatctcaatcaccagcgtactgatgatcccgatccctgtaaaaataccgaatgaacgaatagttggaatgttgaaagtcaacagagagaagaatccagctgctgcaataccaccagccagcaccataactggaccaacacgaaccaaagactgcactacagcttcgctattggcagctttaggctccattccttgagcaatcagacgatcaaaatcttcatagtagcgcttgagcaactgcacggcgtgccctgccgcgatggccagaatcagaattggcgtaggcgagttaaagatatccattggctgtttgaacaagcccatcatgcccataccccatgccacagccaacaaagctgtaacgagcggcagaatcaaaccttgcttgctgcggaatgcttcaaagtgcaataaaccaatcactaatacggcaatcgggaacaagatattgatacgcttagagtagtcttcagctttatccagataaaccggattgccaccgacactgatagtcatatctttagattgttcgctttctacgattttattaatcgggcccatcattttctggaagccctctggactttcctcaagctcaagcaaaatcgcagcagtttgttgatctttagataccactgaattcatataggttggattcagtgccagcagttttttcaggtgatcgatatcttcttgagtgactgaactactcggcaatagtttcttggcatcgaacccttctgcattcgcctcgataccttttgcctgacgtgcagccagactcatcatcgtggaacggaccacgcccggtgcattatcaacttcttcggtaatgcgtttgactttctccaatacttgcggctgataaatatcaccctgcttcggggtaataccaatcacgaccatatatttggagccgaatttcttttcaatcagcttggtcgaggtgatgtagggatgccctttaggtgcaagtgcatctgggtcaataataatttttacaccagatgccagatatgccagagcaagtgttaagagcatcaccacagtcaagacaatacggcggtggctaagaatccaacgcgcgtatttctccatcatttgttgagtcttacgaggtggtttattggcctcgtgagttggtttattttcattgccaaccgactcataggcttcacccttctgagccaatgcttgaagattgtcgacatcttttttgaactgggcgagcaccatcttttttagcagtgctggcggcaatacaccaaaaaaactacctggctctgcttcaaacacccattcaatccatgtaccttccggatgtggtttgaaacggtaagtacctgtgtagtgaaagggcccctccactactttaaacgcatacaattcgttcggtaccagatgtgtaatttcacctttaaaggacatttcacgaccaataaagttaaaaccgatttcgtacttactgcccacacgcggagtactgtctagcaattcagaatgcttacacgacaattgccaacctgcatcattggccgggtttgcaaggtagttgaaaaccttgtcaatcttggccggtatgaggaaagcatgttctatggtcaccatagtggttctaccttcttatatttcttatgcaggaattgggtacatctgatcaattgtctgggctacagccacgacattctcagcgtacataattgatgagtggtcaccaggcaaatcgacttgtgtcaacgtgtctttgactagttgatcccaacctagactttctccaaagtcttcctgctcatctttggccttgaccaaaagtattggaaaatcttcaggttctgggaaataggtctggagtgcgatgccattcgccaaataagtatcaaagtaaagtcggaaatctgatgggtctgcatcgagaggcagaacattaatggctttagcttctttaagtacatgatcaaacatttgatctggactcaactcacgcaaatattgcgctgggatcgtcaactttttgccataaggtgcagccaaatcacgggcgaaccaagacaaaagcatggcatcgtcggcatcttcaggtacattttctggaattggagcacgagtatcgatcatgacaatacctgtgacctgttgccccatttgacgcaactgacgactgatctcatatgcaatcgccccaccgaaacaccatccaccgaggaaataaggtccttgaggctgcatcttttgcatttcagcaatatagagcgtcgccatttcttcaatcgccacttccgcagcatcggcttcaatcagtccaggagactgaatagcacgtagtgtacggttcggattgagatgccgcgaaagctccatataacagaaggtactgccaccaattggatggaacagccacagtggttgttcataggttccacggcgcagctcaattacgatggatggtttaatctctttattttcacgaatgatctcacccagatgttccacagtggagtactgtgccaacaaagcaactgacagttcggtaccaaaagcctttttaagatggttgacaagcttcacagctaatagtgaatgcccacctaattcaaagaaatcatcatgtataccaactcgcttgaccgacaagatctgctcaaaggtagtacacagttcgatttcaatcggatcacgcggtgcaacataatcattgctctgctcaaaaatcggctcaggaaatgccttacgatccaacttattgttagccgtcattggaaactcatccaatcggataaacgcacttggcaccatataagctggaagatggatttgcatggtctttttcaaactagcaatatcaagctcttgtccagttacatacgccaccaatttctggtcgttgtcagctgtggtcttaaccagcactactgcatctgtaataccgtcgatttgtttgagaacattctcaatttcacctagttcgatacggaacccacgaatcttgacctgaaaatccagacgtccgtgatgagtcaaacgtccatctgtacgcaggcagactttatcccctgttcggtagagacggccggcatttggtagagatggcaatgttctaaattgggcatctgtcagttcagggcgatgccagtaatcaactgccagaccatcaccaccaatccaaagctcacccataacgcctggtggaactaaacgctgctgttcatcaaggacataaagctgggtattcgccagtggttcgcctaaatcaatatactttgaatcagtgattcgagcagcactagaccacactgtagtttcggtcggaccatagacattccatagacaaccgactttacccagtagtttttctgccaaaatagtatctagcgcttcgcctccacagagtgctgtcaatcccgcattgccgctccattcgctgtctaagagcattttccaagtagccggtgttgcctgcagaacattgatagacttagcatttagataatccaccaattgattgccatcttgtgatacttcacgtggacaaacatgcaccacaccgccgtacatcagcggaatgagtaattcaagaattgaaatatcaaatgcataagtagtaattgctaatagctgagtttcagcagttacttgcaatctatcattcatagatagcaagaaattgataattgaaggatgcccaatacggacacctttaggcttacctgtcgagcctgatgtgtacatcacataagctatgtcaccaaaggcaagcgtctcgcgcacttgttcaagtgccacaacaccagcttgattgatatctaggcgaggcacagaaacgttaagaccatccattaactcggtttgagtcaagatgactttaggttcagcgtcttcaataatgttctgtagacgttcagttgggaaattaggatctagcggtacataagctgcacctgccgcccagattccaaggattgctgctggcaataacgctgtgcggtctaacattagacctacacgatcaccttgagtaataccgtgtgcacgcaaatattcagcaatacccgcaatatgttgacctaactcacgatagctaaccgtatgatcgttcgaggtcagagcatgattgtcaccacgctcatcaatctgcttgagaatcattgtgaatagatcatgctgagcataatcagtcacctttccacggagggcctcgaactggataccatctttataatcaggtgcgatatctaactcaacgatcttacgttcagggtgagccaccatctctgatagtacagcttgcagcagttgcaccatattctcggcagactgtgcagaaaatagatcagtgttgtatttcaatacgccaacgagttcaccttgatattcaccgcccatttccagcgtaatatccaactgcccttcttgctggcgaaccggaaaacttcctaacgtcaaatcttgtccaaccaaagtggccggagtctggattggtaggagtagttctttaaactcatccataccacccagacgttcccagaacattcctatctgagccaatggattaatactgccatcacgctttggtgagacagcttcaactactctagaaaaggcaattttttgatgtttaaggctttgtcttaattgttcctgaacctgctgcgtaaattgacgtaaagtctggtcagcatcgatgtccatgtgaatagcaatcgtgttgacaaactgacccaatgcattacgtaaagaacgttcaagtcgacctgctacgggcgtagcaatgactagattattttcattagagagtttgtgtagcagaacataaaagccagatagcacaagtccgaacaatgtgatctcataatcttttgctaagtttacaaggccagatgacactgactcaggcacacggaaaactagtgaactgcctttatgttgctgtacggctggacgaggatagtcaagcggaatgctatgcacatgtggtgcatgcttcagtgcatttttccagaaaattaagctctcatcagtatcatcaatcacgctgctctgctgcttatcggcatactgtgcaaactcgattccgttcactaaatctgcctctgcaacgagcccaaaacgtttgctaacgtctcgcagcaatagaccaattgaccaaaaatccatgagcgcatgatgaatcacaaatgcgattacataatgattttgaccgcgttcataacaatgaatacgccataacggtggctgagtcaggtcaaatggctgcttggtgtcctgttcaaccaattgcgtcaaatcagaagcttcaatatgacgagcatcagaaaagatgatattcggatacacgcgatcccagatcagttgctcaattccctgatcattggctggcatgcttacgcgcagtagcggataatcatgcattaccgcttctagtatttctattggcttgttacctaatggttggttaaccttcacatcaaaggccaccaccatattgtaggcactgcaagttggctcaaaacgctggatataccaaatgccaagctgctctgcagaaatcgcatgacgcgacagaacttccggttctagtcgtgcaaggttgttcatgaagcaactccctgctgcaactcagaaacaagatattcagccaacgcattgattgttgggtaatcccataatagtgttggctcaagttctaatttcgtcagatcttctaaatccccagacacagacaaagcaacaatcgaatcaagaccataactggtaaatttttgatctggatcaatcgtctcaggctctacgcgcatctctttagcgactagcgtacgaatgattgcgctccagtaagctttatctttattcatggggtaatctcctttttaaccggtttggcatcacgcggtgccagtgcaaaatcgatgacagataacatgtgattggttgaaattcggtccagcagatctgccaatgtgctttcacgtagtgacgtcataggaggagctgtctgcccttcagcagcatttaagaaaatgatcagccatgcaccatcctgtaaagcaggccttaaaccatggcggttaaaaacccagaaacccaacacagcaatacgagcgaataactcggcgtagtcacgggcgagactgaagcgcatcgtttcaaactccttgctttgctcagaatttgaaaagtagtcctgaattttttgatccaatgaacgctgttcaacaagaagctggtttgctcgctcatgtagcgtagctagcgtctcagcagacaacccaactgtgacattagagtcgttgagcatttcgatgattgtttcgagtgactccatcaccaagtcaccatctcggttgaaaatctcaagctcacggaaatcaatagcacctgtctctacctgtaagtcatataactggcgatagcgtgctttcgcttcagcttgattgagatggtcggcttttttgctgcgccctttattggcagatttgagctgaaaactcagactgtctaggcagacggtgctactaccgtcaaacacactgacaatcagatggtccctgaatgctttctgaaacattccatctgcatatgcatttcttaagaaaaaacgtgacccaagcactgaggatgtgattttggcaagcgactctacatattcaggcaccagtaccttgacgattggtgaccatgtactgaactgattgatacaaacgtgtaaccctcgcgcaccaacaagtgataacacctccgctgctaaaaggtaggcataagctgtagcgagttgctcacgtaccaacggtatgcttattacttttttgttatataactcgcgttcaatcgcaaactcggttgcgatgcgtagcatcgtatcgccggcacctagagagaaactactgcaatatgcacgtgttacctgtagagttttgagtccaagttctaacccctggccttcttcaccgatcagggcatctttatgaatttcagcgttattaaaaccaataccgctgatatctaaaccacgcatgcccactgttggcaggcggttcaggctatacgtacctttagaagccatatgacgcttatcgagccagaatgcactcaggctacggggtccacgatcatttgacgttttagcgattagacttaaagagtcacctagagtggcgcgattgatcgaccatttctcgccatttaagacgtacttactgtcggaaggttgcgcagtcacttcactagataacaggtcagcaccatgcgctttctcactataagccagcgctggagcagcaccacttaaaattcggttagcgatgttttggcattggctctcattaccaccgatccatacgatcacagaccaagcattcgtgctataggtcgaattgatggtcagatcgcgtcgtgccaacacgcgatgcagatataacaactcttcaccaatttccatacggcctccaagctctgaaggcacatagaaacggttcatacccaccgcattcagaaaatcaacagctcgctgtggatattgctctttctcatcacgctcgatagctgcggaccaagaaaaatcattattggtatcatgtacggagcctaaaatttgctccagacgagcagcagattgaaactgccgcaaattggacgtaagtgacatggattttcactcaaagatttaaaagataagggttaaaacaaagcacttttcagacgattaaaaatcagcgtgcgtacttcacgttccttgatcattgagttgagtagattggagctataacgaatcagctgcccccgctgctcacgatcacggatgacgtctaagccgttcttgacatagtttcgagcaatcaccgttctacggtttggatgggttaaacagaccagttgaccgcgttcgatctgctctttaatttttcttcttctaattttgccgctagtggtcttatttattcggccttggtgcagtaaatagacaccgtctacaggcaagccaatatcagccgccacttgttctttaacttgagtcctgatggtttcaaaattaagtgtcttatctaaggactttttcttaatctcaagtacaaccgtaaccccttcagaatcagcaaagttcactgccgcaacacaacctttacgaacagcaggatgtgccatttcaacagagcattcgatatcttgcggataatagtttttgccacgaatgataatcacatccttaaggcggccggttatataaaggtctccgtttttgataaagcccatatcacccgttcttaagtagtgtacttggctaggttgtcccgcttcattaaggatcgttgcttcaaaagtttcctgattaacttccggcttttgccagtaacctgcagtgacactctcacctgctagccagatttcaccgacttcatgagccgctacctctttacgggtatgaggattaacgatacgacaatcaatatgtttcgagatcttgccacaactcactacttgcacggctgtctgatcttggctggtctgtaccaaatgggcatttaacttgtcacgatcaagtgaaatcgcattgagagggccagttacgccactgactaagagcgtcacttctgccaagccataacatggcaagaaagtatcaagtcggagcttcgattgtgtattgaacttctccatgaagcgttgcatgacatgggccttgatcggctcggcaccattaaacagcacacgcacacggcttagatcaagcgctgcagcctgctcatcagtgatgcgatgtaggcacaattcataggcaaagtttggtccaccactaatcgtgacgcctttttcactaataaattgtagccatttaagaggttttcgaatgaagtccagaggcgacatgacataacaagtcagacccacatatacagtttgcaaaaccgagccgatcaaccccatatcgtggtaaacaggcagccacgtcaggccaacatcttctggttgtgtaccaaaagcttcagcaatcatgacttcattggccataatatttttatgagtgacaattacgcctttaggccagcctgttgagcctgaggtatattgaaggaagcagatatctttttcagtaataagcggaaaatctttttccaccaagtcacgctgcaattcggcatcaacagcatgtaatatcaaattttcattttgagcttttagtgtgataagacctgcgagctcaagaatcttttttgttgtgagtacaatcttaggctcacagtcattcataatattcaaaatattagaaaaaccgttgcggttaaaaggcaagctgactggtactgcaataattttagctttcagacaggcaaagaacgatacgataaagtccaacccaggttcgaacagcaatacggcacggtcaccactgtctacaatactcattaatatttgggcttgatgttgaactcgctcattcaaatctgaatatgtcagagattgaataccaccagactggcgtcccaaatactcaaaagcgatcttatttccatttaattttgcgtgggattccaaagttgcaatgatattatccgtacacattacagccataacttactccgattaattataattaacctttaaaatctgctaattcagaaacgacatttcttgctaggtttcttaataaaagaataaatatactttttatttaaaatataaattcacattatattttatgtgtgagtgttacttattacacctgtaagtgtttacaggttagtggtctcttattgaaaattaagaagctaaatcctttatatgaatcatttttgttcagttatatatttttaatttcttatcattattttaaattaatgcctcacctattcctaatttagatacgcacaagccaagtctttgaaggtttttactcttaaacagttgcatcattattttttaactttagagtaaatatttttaaaaaatatataaaaaataatataaataaaaaatcaaactatttatatttatataggtacacataaaaataaatatttaaaaatacagcataaagataaataaaaaattttattttaacattgaaatatacttattatatttccttaaatttaaaataattaattaacttaaatcaatcatataaatcttaaaattatttatttcttttaattttaatattaaagtcctgtgttatttatactctctacaaaagccctagcattactgctcgaatagctgctgaaattttattatttacatttaacttttgcatagagttactgagatgaaaatttacggttctttcagttaccccaagaatctgagctatttctgctgacgttttgccttcggcagtccaacgtagcgcctctttttccctgttcgttaaataaagattgaatttagcaaactctacatcatttactattttagcaatgctggaatgcactgtttgagtcaaccagtacatattcgtatattgtgctttttgctctttttctgataattggtcgttggatcttgccagtgttagcattcctcgggtcccaataaaatcacgacttgactgagcccaaccgacatttaaaccataagaacgcgcctcctcccaaaaatctttttctgcctgtgtttttgcagattgactcgaccaaacaagaggttgaagtgataccatacaatgctgcacagttggatctatcttcacatattgtcgttccacataacgtttctgccatgcttctggataattattcaacataattgtttttggttcagcaatagataagggtgattgcataccataagcgcaatagtcaaatccgagccttgatgcggtagatttaacgatctcaaataactggtattcattttttaccaccaaaaatgctgataataaatcttcttgccaactttccatttgctctcattagactccattcacagactattttttattcggttgcatattgtgaatccaagcaatcaaattgaagcgtaggtctaaccttttaccgtaatttccataaagtccttcaaaaatctaaaagattctgaagttgctaaatatattttcggcgcctactcttctattagagctctcaattaaagattttgaattcatcatccaattaacaacacttttaagcccgaaatggttgcaaattattcagataaactagatgtctgaaagctttcaaggttgttatatttcatgcgcagattatgctttaaaaattaaaatttacacgatgcattttattccaaaatatatatttttttaatttataaagaggtcgaccacttaatttttatagtatgtttttattaatttaattaaataatattgtttatcaattattcgatatctccaattttcttattttttatatataaaaactaaaaataattataatattttaaaaaccaatcaattaaagtaaaaatcctcatacttgtaattattatttgagtagtagcaatattgactatctaataagctccatcgtaggattctctttaaaaaaataatttttacctgaaaatctctctaataagaagagcttaaagatgtgctaacaaattatagttaacctgttaaatataacagtattttattggcaaaaatttatgttatttattcattaaatcttaatttagggtacttaagcaggtagcatggttagcataccccctcatttctctatctcaacagatggttttattcgaatgaacgaaaatcaactcatgagttatcctctccaacacatcatctctaccgttgaatctagacatactgaagcgtctcaaattttctattatggttttactgaatgggcaacctcacaaactccagctttaagtaccggatgggattgggaatttattgagcaaaatggcatcacgagcataaagcgaattggcctgcctcgaagcaatatcatgattgttgatctatctggtaaagacattggatatgatgtgactgaaatactaattgaaaagagaatcgatactctgttctgggaaccgtttatttatgcccaaatcaatacgtcattaaccaagtcttcattaagacaaaccttctcttagaaacctgtaaattcttacagttaccgcctttccagctgttcagtaaagtcacttgaaaaataagcggaagcacttgtaatgaatattattgctggatttcaaaacaatttttcagaaggcctatataccaaatttaaaagttaccgctacagggtatttgttgaatatttgggttgggagttgaactgtccaaacaatgaagaactagatcaatttgataaagtcgatacagcttatgtcgtggctcaagacagagaatccaatatcattggttgtgccagactactacccaccacacaaccctatttactcggggaaatatttccccaacttctcaatggaatgcctattccctgctcaccagaaatttgggaattatcaaggttttcagccgtagatttttcaaaaccgccttcctctagcagtcaggctgtgtcatcacctatctcaattgcaattctgcaagaagcaattaattttgcaagagaacaaggcgcaaaacaactcattacgacttctcctcttggagtagaacgtttattacgtgctgcgggttttcgtgcccatcgtgcaggtccaccaatgatgattgatggatattcgatgtttgcatgcttgattgatgtgtaattagatatctaaattttcatcaaatcaaggtctaaaacattggtgagattatgaagattgaagacgttagttcaaatatcgtttcgtccactaaatattaaaagctctactcgaaaaattaaggttttcttgtttacgtagatctctttagttaaataaaggcctatctaaatttattcataaaccgatcattcctttaacctttttatttaatagattataaaaatttgcaaagttctatttttattggtttaaaataaatccaatccgttatttattttataaagcttaagcaatagggatactttatcaatacacaaaaagataaataatatataaaaataggccaatataattctttattccatagctgcctgtgaaaaattcattttatccgtttggtaagaactcttttacaaagtgcttacttagataatattaaatgagctatagaatacaaaaattataataatttagtactttaactccttcttaattttctgacaaactttcaaagtggagtcgacctcacttgaagtaagattaagtttgcatttagtattttcaaatattttacctactggaccttttaaatccttacctgactccgttaatgaaatatattttcgacgacggtcgagcgcgtccactgatacaacaataaaacccgctttttcaagtcgctttatgattggagtgagcgaaccaagatcaaacagcgtttgttcacttaataagctagatgacaagtgattttgattccaaagagcagccaacaccaaaagttgtggatatgttattccaagttcagataatggtttggtgtagtttcggatcatagcattcgtcgtcgagtacagtgtaaaacagagcattttgtcaaaattaaatgtatctagcatcgaactcatctgttatgtcctaaaaaattaaaaacgatgaacagcctcaattaacacggataccgagtctgggtttgtttctttcgaaattccatgccccaagttaaacacaaaacctgtatcatctttttgttgttcataaaaagatgtcataactttattcacttcgttttgaattacagaatttggggcaagtaatactgcagggtcgagattaccctgcaaggcaactctagaacccactcgctgacgtgctaaatccagatcagtcatccaatcgagccctaaagcactagctccacatcctgccatttcttcaagccattgaccacccccttttgtaaagacaattgaaggaactaaacgctcacctaactggttttttaagctatctaaagtaaagctaatgtacctgagagaaaattcttgataagcagctcggcttagtaaccctccccacgtatcaaacatcatgatggcctgtgcaccagcctccacctgacatttaagatgctgtacaacggctttggcatttttttctagtaattgatgtaagattttcgggttgctataaagcatactttttatagttataaaatcttttgaactctgtccctcaaccatgtaacaagccagtgtccacggacttcctgaaaaaccaatcagaggaacttgcccattgatctcatgacggcattggctaaccgcttgatatacataagataaagattcttgggaaggaatctctaaattattgatcgcttgttcagaacgtataggttttttgaatttaggtccacgattttcttcaaaatataaacctagacccattgcatcaggaatagtcaaaatatcagaaaatacaattgctgcatctaaatcataacgtcgaataggctgcaaagttacttcagttgcatagtcaggcgtcttcattaaattaatgaaatttcctgccattttacgtactgctcgatattcagggagatagcgcccagcttggcgcatcatccagatcggtgttcgatctacgggttgtttttgtaatgctctaataaagttagtatttttaagcggtgcaaatttcgtcatttgagactctaatttataaataaagatttagctaattcgattatgattcgcagcatttttcatttctgaaatagcttcttgataattagaagtattaaagatcgccgttccagctacaaatgtatctgcgccccatttagcaatttcagcgatattgctcacattcacgccaccatccacttcaagacgaatatttctaccacttgaatcgattaactttcgtgcctcagcaattttaggaagaacagcaggtataaatttttgtccaccaaaacctggatttaccgacataatgagcattaagtcgatgttatccataaggtatttgcatgaatcaagcgaagtagctgggttgaacaccaaaccagctttgcatcctaagtctttaatgagctgaattgaacgatccaaatgaatagtggcatcagggtgaatagagatatagtttgcaccagcttttgcaaaatcaacgatcaaggaatccacgggtgaagccatcagatgtacatctatcggtgcttgaattccttcagatctaagtgcagaacaaacttggggccccatggttaagttgggaacatagtgattgtccataatatcaaggtgaatcatatctgcaccagaatctaatactgacttcacctcttcacctaaacgggcgaaatttgctgctagaattgagggagcgatccaaatgtcattcatataaagagcctaactataaaaattattatcaatgatttgcaaaagaagatttgatatccaaaatcatctcgtgacttaagttttctaaatgtaagtgatgaccaccttcgtaccagcttacttttgcattttttcctaaatactctgatttcgaatgaaatttatcaccaacaaataaaccatttgttccaagcagaatagtcaaaggacaatcaatttgatttagaaagcgaccagcttgtgcatcagtcaactgaattggttctggtatagtaagccgaggatcatgtcgccaccgatagcctgattcgactgctcgaagatcacgttctgcaagccgtctggcactgtctaaagagataaatccaccaactactttctggcgggttttcactgcaacctccatacttgaaaactgaggttggttcttttctgaaaacccgttaagtttggtcaaatgtgctatttcagaaagtcgaagcgatgttttcaaatgctgcacgacatcttcagccgagacggtaaaaggagctcccataccatcaatgaaaactatgcgttttattcctttactaatggtatttaaaattgatgcaacacctgtacccattgaatgagccaaaatagaataactgttccaccccatttttctgacaaagatagataaatcaattgcataatcccataagtaatatgcttgatttggttttctatgatctgatttgccgtgtccagcaaggtcaggagccacaatatagtagtgatctaggtagggagctattcgtgagaatgatgcacaattgtccaaccacccatgtattgctagaattgggggattttttttatccccccaagttcttactgctaaatctaagccattaacattcatcgtgaattcacgctctatagcaggtaaaactttaaaagttaaactcatcatatccatatcgttttctgtttaaattaagtcttgacgaattaaataatttttaaacagcgacatttgatcttgaggttgtttcgtcagctaattcgctctcaataatttgttttaagtggattaaatcaaatttaccgtttgaagtacgaggaaacgaatttaagaatctgatcgtatttggaacttgatgaggttccaaatcatttctacatttttctaagagctcaagctcgttaatatttttattatcagctatttgaataaaagcatgtaaagtcccacctaagttctcatcctcaataccaacgacaacagctgattcaatattaggcaaactatagaaataattttcaatttcaacagggctaaccttcataccacgagatttgataacgtgatctgtgcgaccacggaagtacaagtaaccatcttcatcaagaaggcccaaatcgccagtatgtaaaacatattcattaggcaaaggtcctggtttaagtttttcttgagtcgctttagtatcgcgccagtaccctgccataacagttgctccacgtatcacaagttcgccgatttggtttggcttattaattttgtttccatgagggtctattaaccacatttctgtatttggaattgcgataccaacactatcaggtttattgtcaatttggtctggtgggagatatgtgcaccgtttacactctgttaacccatacatagagaatatttgtgcgttcggaaagagtaatttcatctgttggatgtgatgagatttcagtgctgcaccagtatttgttacgattcggacatcaggaaaggtaacgcccgatctatgcgaatattcatagagaagcgatagcatcgtaggaacaaatggaatgactgttatcttatgttgttttatttttttaattaaaaataacggccatgtaagttcctgttcgaggaataacgttgcacctttactcatagacataatcatttggtaaagaccataatcaaatgataatggcagtgaacaaagaatatgatctgattcttgataacctagataagtattcaatgaatctaatgctgcacacatgtttctatgtgtcagcattacacctttgggtgttccagttgagccagacgtataaacaatagctgctaaatcaatatcgagaatattattattcagatattctacttcattgtaagaagttgctagctcccatgaatctacatcaggatccactaatgaattggtaacaacaacacttttaaatagaatacttttagacgctacagatacttcttgaaacttttgttcattggtgatcaaaattgaagcctgagaattctcgataatataatttaatttatcggtggttgtatctaagcccacattacatacaacatagcccgctttcagtacaccccaaaaagcaataatagtttctactttatttcctaaacaaagtactactctatcaccacgatgaagaccctgagcttgtaaatagccacttaagcgcgaagacaactcatcaatcttgctataagaatgtgagtttccattctctacaattgctaccttttcagcatatttacgtgcgatataagataaagtgtgatgcggcaaaatattatacatttgcatgacactgctccttcatctcaacttgattaaagcggtttttttcagcttcgatataagatgcaagtgtttcaattgtattgaaatgcttaggttctatcgtttctggattaacaaagaaatgttcgatttggtcttctaaagcgaccaatatttctacagaagaaagtgaatcaatccccaaatcatcacgaagatgagaatttgcaagaatagttttgtcttgaggtaattttagaattttactaacaatagtggcaacgatacgctgtgtgtcatctgtaatgacttcattatgcttttcttcagtaatgactttgttttgtcctagcagttgctctaatgaaatatcggtgtgcatcgaaataatatcttcgactgtatctctataacgtactaaatttagttttccatttgagtacagaacttctgctgggtagccatgaccgtgaaataatgttggggaagccgtagccccatacgcaccagatgataatactgcaagaagatcaccagattttaatttttcaagttttatatcttttgctaataaatcgtcaggattacataatggtccagaaacatggtaggtttcaatttcatttgatttttggtcagtaactttaataatctcaaaatttcgttttaaaacctgaccagaacccacagcggctgaatggcagtttgttccaccatcggttacggcgaaatttttgccatggttttgcttgatattatcaacagtcactaacagagccgcacttttaccagcaatgaaacgtcctgactccataatgatgcgagttttaggatgttttttgtgaaagtcattgaataaaggatgtaataatcttgttaattctttgatgtctagatctttttcattttcatgatacttaatacccagaccacctccaacatcaaccatcgtcaggtctaatccatacaaacgtgaaatagattcaaatagctccaaaacatattttgagttgtcgtagatagactgtgcatctaaaatttttgttccattataaacatgaagtccttttagatgaatattaggaagttttgcgtaactccccatcttttttatggccgtttcttcttcaataccaaaatgtgtaggtctacctcccattttccatggagaaccagatgctgagaaattcggattaatacgtattgctactggcgctaaaacccccatttttgtagctaaatctgataattttttaagttcttcttcagattcaacaacaatagcaaaaatatttaattctaaagcgcgtctatgttcttcttcttttttcattggtcccaagaaaattatattttgagggttcacacctgcttttagtgcaatttctagttccgttaaagaacatacttcggtgtttccaccataagacttaattaatttaacaattgataagttaggattaactttgagggcataaaaaatatcaacgcactttggtaatgcatttcgtaactcttgaaagctgcttttcaactgatattcatcataaacatatattggtgtcccaaaatttttctttactttcaataaaatttcattggacaagttcattttctaaaatacctacaaaaaagtgtttttatataaaaaataagaatttataaaactttgcgcacaaagttttataaattattgcacttttgttgtttttttgtcaaacaattaattaaaaaaataatattttataaaaaaatattattattgataataaatcttctttttatgtaattaacttatttgaatgattctccaaattatcaatttttaaaagccctagtttaaaaactagggctttttcttttaaaattttaaatattcaatcaatcttggtttttagatttaagtttgctttcttataataagtctcatcctttttatagctccaatcgcgcggcataaatgatgtcgatataatcgcaactacagccatacttccgatataaaacataattaaatatggattgccttgcccaatactgagcagtttagtggcaatcataggggctaaaccaccacctaaaacacctgccaactgtaccgaaatcgaaataccgctataacgaatttcagcaggaaattgacgtgcaaaaagctgagcttgtggcgcatacataatcggaaacactacaccaattgccaaaacaattgccgtccagaccagtaccggatccttggtattgagcatgctaaaaaatggataagaataaagtgccaatacgcatagaccaaacataaacatattgcgttgaccgactttatcggacaaatgtccgcataacggcgtcataaataaaatgacggctgcgccgcaaatggtggcaaataaaatgtcttggcgtggaattccaagttgtgcggtggtataagccaaagtaaatgttgaagcaatatagaaccatgcattttcggcagcacgagctaaaataatggtaataagttgctttggatggtttttaaaaacctgtaaagcaggaactttgacttcttcagactgttgttttactttttcgaaatctggtgactcaggcacttttacacgaatataccaacctactgccagtaaaataatgctagcaagaaatggtaaacgccaaccccagctaaacagtgcttcttcaggtaataacgacaccagacccaacgcgattgaggctagcattaagccaccacctgtactggcttgaggcaagcttccccaaaaccctttaccaccttcgggagcatgttcaacggccatcagtacagcaccgccccattcaccgcccattgccatcccttgaataaatcgtaagacaaccaaaccaatcgcagcccaatatccaattgattcataagtcggtaataagccaatcagtacggttgggatccccatgagcatcaaggtcaacagcaacatcgatttacggccaatcttgtcaccaaaatgaccaaagactaagccgcctaatggtcttccaataaatccaacggcataggttgcgaatgcggcaagcacgccggtaagtgcgtctagatttgggaaaaatagcttattaaaaatgagcgctgccgccgcaccgtaaataaaaaagtcataccactcaatggtggtgccgaccatgctagagatacctgctaatcgatgtgacgactttttagtatttgaaccgtttccatgtattgattgcatcgtaatatcctttttagattttcttgttttatcttttttatgcttatgaccagccctgaccataagcattttcaggtctcgctttttctccttaagctttttatatttttgtaattcggtttagctcaatttttctaaaattggctcaaatttcgaattacgttcttgccactgtggttgtttgtctttatcgacaatgagagcgcggacaccttcaataaagtcaccgtgctcaaaccaaatatcctgtaaatcacgttcaagctgcatgcactgaggtaaagagaggcctcgacctaaatgttgcagttttaaactagtttgtttggcaataaatgagcgctgctgcaaaatgctgagcatcttgcttgcccaagtctttaagctttcatcttgttcattttcaagactttgctcgatttcatctaaatgttgatatccgaagtgtttacggataccttccgccaattgttttaattcactttcggcagggcgagtaataaatcgggtaatgatgcgttcaattccctctttgcttaaacttggtgcgtcaacgagagcatcttgcaaagcttgtaactgctcgcttggcacatggtagtcaattaaatcgaggtaaagcgcatcactactgctgatctgctcacccgtaatggccatataaacaccaatatcatcaaggcgagacaggaagtgtgttgcacccacatctgggaaaaaaccaatcgctgtttcaggcatggcaaatctggacttttcgctactcaccacaatatgacaagcctgagccaagccaaaaccgccacctaatacatagccatcaagcacaacaatgattggcttttcatattcacgcagtatatttagcattttatattcggcactaaagtagcctttgtaatcggccgtgccatttttataactgtcatagagatagcggatatctccaccggcacagaaggcttttgggctatttgacttaattaacactgcctgaacagcagcatcatttcgccacagttccaattgggcgccaatacttttaatcatatctagcgataatgcgttgagatgagtcacacggtctaaggtaattatgcccaacttaccttgttgctcaatcattaagtgattttctgtattcattttattgatctcttattgatttttaaaatttgcctttcgtttttcaacaaaagcctgcatcccttctttttggtcaaatgttgcaaatattgaatggaacatacgtctttcaaaacgcaagccttcagtaaggtttacttcaaaagctcggttgatggtttctttaagaatcatatttgctgttaaagagcgtaccgcaattttttcagcggcttgcaaggtttgttcaagtaattcttctttagtaaacacacgtgcgactaaaccactttgctctgcttctacagcgcccatttgacgagcggtaaggcacatttccattgctttggctttaccaatcgcatgggttaagcgttgtgtaccgccaatgccgggaattacacctaaggtcacttcaggtaagccaaacttggcgttatcagcacaataaataaagtcacacatcagcgccaactcacagccaccacccaatgcatagccactcaccgctgcaattagaggtttacggcgctgtgcaatacggtctgcaagatgaaaaaagtcatctaaataaatatcaggaaatgccaaatcagccatttctttaatgtcagctcctgcggcaaaagccttttcagaacctgctaatacgatgcaaccaatttcgcggtctttttcgagctgatctaatgcctgattaatttcactaattaattcgctgtttaaagcattgagcgcttgagggcgatttaatgtaatcagtccaaccccattacgcttttctaataaaatactttgccactgcattacttattccttgttctgattttatagactacgtgcgatgactaaacgctggatatcactcgtgccttcgtaaatttggcaaatacgggcatcacgatagatacgttcaattgggaagtctctcaggtagccatagccaccaaacacttgtagtgcactcgaacacacacgctcagtcatttctgaagcaaataacttggccattgaagcttcattgagacatggttgacctgcttcttttaaacgcgcagcgtagtgaaccagttgtctcgctgcttcaatttcagttgccatactagcaaggcgaaacgcgatggtttgatgctcaaaaattggttttccaaaagtaatacgctctttggcatagcgagttgcttcttcgagcgccgcacgtgctagaccgactgcttgtgcagcaataccaatacgtccaccttctaaattggcgagagcaattttcagaccttcaccttctttacccagcatgagacttttatggatgcgtacatctgtcagcgcaatctgacacgtatctgaagcatgcagacccagtttttcttcaacacgaatcacttcatagcccggtgtttcgcgtgggactaaaaaggcactaataccttttttgcccgcgctcggatcggtcacggcaaacacaataatgacgccagcattattacccgaggtaataaactgcttggctccatttaagatgtaatcgtcaccatctttcaccgctcgggttttaatggctcccgcatctgagccagtatgcggttcagttaaggcaaaagcgccgatcatttcaccttgagccaaaggctttaaaaaacgctctttttgctcgtcggtaccaaattttaaaataggcacacaaccaaccgagttgtgtacgctcatgatggttgaggttgcaccatctgctgccgcaacttcttcaagcgccagtacataggctaagttacccgtgtcagaaccaccccattgctctggaacaagcattcccataaaaccgagttgccccatttgagtcagagtttcttttgggaaagttccatctcggtcccaatcactggcattaggcttgatttgttcttgggcgaaacttttcgccatatcacggatgagtaattgttcttcggtaaattgcattattatttcctttaccctgctttagcttgttgtttagcaatttcttgattacgcaataaaaagcgctgaattttgccacttggagttttaggtaattcactcacaaattcaactaaacgtgggtaagcatgtgcagaaagtcgtcttttaacaaattggctgagttgttcagcaagtgtatcggaaggttgagcatccgcagctaaaattacgaaggccttaaccacttcggtacggtccggatcaggcacaccaatcactgctgcttcaatcacagcgtcgtgttcaagcaaagcactttctacatcgaaaggcccaatacgatagcccgatgtagtgattacatcatcactacgaccaacaaaactcatgctgccatcggcatgaagctcggcagtgtcgccagttaaatagtagtgacccacgaaaggcgattttcggctttctttatagccgccgaaccacatcattggagactggctaatatcgactgctaaaattcctggggtgtccgctggaagctcttcaccttgttcattaacaattgcaacacgatagcccggacttggaaaacctgctgaaccagcatgaatttcatgttttaaaccatgatgattacacaccaccatgcctacttcagtttgcccgtagtggtcataaattggagcatcaaggacttgtttaaaccaacgaattacttccggatttagcggctctcctgcactactcaccacacggaattgtccttttaacggcgccatttgtgccggatcagctgccatcatcatgcggtaagcggttggtgcacctgccaagttgttaactttataatctttcacaatttggcataggctatcggtactaaaaccgccttcatagaacaaagtggcatggcctaaaaataacggtccagtaatcgcatagtacagaccatacgcccaacccggatcggcaatattccagaatgaatcctcttcggttaaaccaatggcatcttgcatatatcgaccaaaagcaatcaatgcttttagtggcacttccaatggtttcgctggtcctgtagtgcctgaagtaaacataagcaagaaaggatcttggatgctacgcatcaccagatcacattgatcggactgctgcttcacttcattccagaaattaaaatcacctgctttaagcggagtaccttgtgcgtcggccactgtcataattgcagggcacttttcaatttcgtcgagcttgctacggttgcccatatcggtcaccaccagcttactttgagcaagttgaatacggtgctcaatcgctttgggaccaaaggcagtaaataggggttggtacaccgcaccaattcgccaagctgccaaaatggtcacgatcagttcaggtgttcttggcaataagcctgaaatacggtctcccgctttcacaccttgtgattttaaaaagttagcaaactgactcgaccattcttttagttcacggaaggtatattgttctttgcgaccgtcttttccttgccagtacagcgcgatcttgtcgccatctgcatgtctatcacaacattcataacatgcgttcagtgcatcgagtgaacctgacaacatctgtttagcagtgctttccaaatcgaaagcctgtacagcattttgataatccatcatatcttttccctcagtccggatttgttgttattcacgacagggtttgatttattcgtttaaagccatcctttggctttaccgttatgcctcttgtggcaggtattgctgaataatgctcgagaaatcgagatgagcattaccacgcatacacatttgctgataaagctgttgtaccatgccacctaataaaaccggctgtttcacttggcctgcggcttctacagcgagtcctaaatcttttagcattagctgtgtcgcaaaaccgtcttgatagcctcgagatgcgggcgcattttcattaatatgtggccatgggttacacacatccgaactccagcaacggccacttgaagtattaattacacctgccaatgcttgtgggtcgatgcctagcttcacaccgagtgccatgccttcggccaccgcagccattgaaattcctaaaatcaggttattgcaaattttggcaatttgacctgcccctacatcaccacaatggacaatatttttgcccatatggctgagcacaggtttcacctcattaaaggtttgttcatcggcaccgaccatgaaggtcaaggttcctgcttgagcaccaatggttccaccagaaacgggtgcatcacaaattttaatatttttgctatgtgcaacagcagcaatgtctttaatggtttgcgggtcaatggtgctgctatcaatgcataagctacctgcttttagcacttccaagacaccattttcacccaagtaaacctctttaacatgcttcgccgcaggcaacatggtaatgactacatctgcttgtttagctgcattctgtgggctgtcgcagaccaccccacctgcctcggcgaagtgctgaatagcaacttcactgaggtcgtaaccataaactttgagtccggcttttagtaggttttgggccattctgccgcccatattacctagaccgataaaggcgatattcatccgtgatccccttaacgtaaactaatggttgtatttacaccgccaacttcatggctatcttcaaaccagcgactggtaatcgttttggtttgggtatagaactgcacagcctgtttgccgtatggccccaaatcacccagtttcgaacctcttgaaccggtaaaactaaagaaaggcactggtacaggaattggaatattgataccgacttggccaatatcgatgaggttttggaaagtacgtgcaatggcaccgctttgtgtgaatagacctacaccgttaccaaatggattggcattgatcaaagcaatcgcttcatcgagtgtatcgacacaaataattgaaagtaccgggccaaagatttcttctttataaatacgcatgtcggtatttacgccactaaaaatcgtggcacccacaaagttacctgactcataaccttgtacttgaacattgcgaccatcgagtagtaactctgcaccttgctcaacaccgctattaatcaagtcaattacacgcgctttggcacgttttgaaatcactggaccaatgtcagtatttggttcatgacctgcatttacttttagagttttggctttttcaactaactcttgaatccactgtttactgtcgccaaccatcactgcaaccgacaatgccatacagcgttgtcccgctgcaccgaatgctgcacctactaaagcatttaaagtttgttctttattggcatccggcatcacaaccacatggttttttgcacccatcatggcttgcacacgtttgccatgctgccctgcaaggttataaacatgtgttccaaccgctgttgaacctacaaatgaaattgctttaatgtctttatgggtacacaaacggtcaaccacttctttaccgccatgcacaacgttcagcacacctgccggaatacctgcttgaatcgcaagctcaaccaacatcatggtcgataatggatcttgttctgaaggttttaaaacaaaagtattgccgcacacgattgccattgggaacatccaaagcgggatcatggctgggaaattaaacggcgtaatacctgcacaaacgcccaaaggttgctgcaaggtatacgtatctacaccacgtgctacaccttcaacatattcacccatttgtaaagtaccaactgagcaggcatgttcaaccacttctagaccacgttgaatatcaccttcggcatctgccaaagttttaccttgttcagccgtcaatacttgtgcgatttctttcatgttggcacggatcaagtcttgtagcttgagcatgatgcgcatacgtgcctgaattggggtttggcgccacgaagcaaaagcatcttgtgcagcctgaatagcagcgtcgacttcttcaaccgttgcaaaaggcacgcggccaatcacttcttgagttgcagggttaacaatgtcttgccattcttgtgttttagattcgagaaactgtccgttaataagtaatttagcggtgtccaattcgattttctggattgtgttcataacctctccgtaggtcatatttttattgtgttcagttattagaaaatacttttctatgtatttcctttattcaggttttatttgagactaacaaagaaatctttgaccaccaacgcaaattcatgcacgattgttgtgcaaatatgcacagggacaataacaaaaatgaaagtggattgggatcatctacagttttttctggttttagcacgcactaaaactctaaccaatgctgcacgtattatcggtgtcgagcacagtacggtggctagacggattcaggctctagaacttgctttaggtactacgctatttaaacgtgaagcaaccggttatgagttaactctcgaagggatggctcttgtccctcgagttgaacaaatggaacaagctttcttacaaattgaaaaaccgcatcaacctttgcaaggtcgtgtgcgtattggcacacctgagggttttggaactgcatttttagcccgcttactggctgagttctccatacagtatccactgcttaccatcgacctgatacccgtcccaaaaatgattaagctctcgcaccgtgaagcagatattgtggtatcgattgaacgcccaacctcagggccttatatcattacgcgcttgtctgattactgtttaaaaatttacggtagccaaaactatctagcgcaaaacccaccaattcgccgactggaagatttaacccagcaccgctttgtgaactatattgatgatctggtgtatagccccgaactgtattgtctagaacgcttacctttaaagcttaacgcgaactttcgcagtagcagcattttggcgcaacaaattgcggtcagcgcaggcgcaggtcttgcaattttgcccaagtttttggcagatgataagcctgagcttgaagaggtgttagaacaacaggttcgttttacccataccttctggatgctgaccttcgttgatttacagcatgagccgcgcattaaactggtctgggattacttgcgtaaacaggccgataaataccaacatttactggttgattaaataataaataaaaagccaatcatatgattggctttctggtaaatcgagacaggttaattaaaagatttcttgacctaattttctcatacgcggtttatagaacacataataggtcacgcttaaaaccactaaccatactgggctaacgtatagcgcttttaaggtatctggctctaatgccaaaatcaccaaggtaaacaagaagaatgcaataacggcataagccatcaacacaccgcccggcattttaaaggtagatgctgcatgtaactctgggcgaattttacgataacgtaaataacacgccatgattaaaatccacacgctaatgaataaaatcacacagagcgaacttgccaaagtaaatgcttccattgtgtttggaacaaagtactgaagcactgctccgcccataatgaaaatacatgagaagattaagccatttgacggtacagcacgttttgataaacgtcccaagacactcggtgcctgaccatcttttgataaaccaaacaacatacggctcgttgaaaacacgccactgttcatcgaagacatgaccgaagacagcacaaccaagttcatgataattgctgaaatcggaatacctgcatttaagaacaattcaacaaacgggcttttatctgcacggatatgattccaaggcgtcactgacatcacgacaaaaagtgccagcacataaaacagaataatacgtaccggaatcgcgttaattgcttttggtaagttagtttgcggatctttcgtttcagccgctgtggtaccaatcaactcaacaccaataaaggcaaatacggcaatctggaatccggctaaaaatccacttacaccttttggaaacagacctccatgcgaccagacattactgatgctgacaacgtcaccatgaggagcttggaaatgagtgagaatcatgtagccacccacaccaattaagccaataattgccaaaatcttaatgagtgcgaaccagaattctacttcaccaaataacttgaccgtaagcaaattaagtcctaacacgaatagtacacagcccgcactaatcatggcctgttgcattggtgagaaactggcaccctcgggcaaccagaaacttaaataattaataactgctgatagatcggcaataccgaccaatacccagcctagccaataggtccagccaatataatagccagcccatgggccgattaagtcatatgccatatcaacaaatgacttgtaatgtaaattagcaagcagtaattcacctaatgcacgcataaggaaaaagaacataccgccaattaacatgtaaataacgagaatcgaaggacctgcgagggagatggttttgcccgagcccataaatagacccgtaccgattgcaccgccaattgcaatgagctgtaaatggcgattacttaatttccgttgtaaatgatcaggggaacttgcctcatctgaatgatgaaccattgtcatattagaagtcctttttatatttgcttaatttcaatcagcaacatatagggagaaaacgaaccgtatatcgtgggttgctgagtctatacatcgggacaagatgttcaagtatattttttccttaattgatctatcttttatccctatttttttaaattgcattatttatgtactgccttcacggcaattttaattatccaatctcaattcaccagatgagccgaagtgtagcatgcgatattgttcgatgtcgctttcccacccccttcaaaactgcactgatgactcaaaaataaacaatattattccgataaaaaacctaaagaaaataaaaaaagccaatcatgttcgattggctttttaataaaacttaatggtcgttgacgagttcacgtcctagtcttttcatgcgcggtttatacagcacatgataagtcacacctaaaatgatcaaccatactggactgacatatagcgcttttaaagtatcaggctctaatgccaagatcaccaaagtgaaaagcatgaatgccaaaacaacataactcatccaaatgccgcccggcattttgaatgtagatttttcatgtaattcaggacgtaatttacgatagcgtaaatagcacaccataatgagactccagacactaatgaagagaatcacacagagtgaacttgctaatgtaaatgcctccattgtgtttggaacaaagtactgaagcactgccccgcccataatgaaagtacaagagaaaatcaaaccatttgatggaactgcacgttttgataaacgtccaaatgctcccggtgcctgaccgtcttttgataaaccgaacagcatacgactggttgaaaacacaccgctgttcattgaagacatgaccgaagatagcaccaccaaattcatgatgatcgcagaaaccggaatacctgcatttaagaataactcaacaaacgggcttttatctgcacgaatgtgatcccacggtgttaccgacatcacaataaataacgccaatacatagaacaaaataatacgtaccggaatcgcgttaattgctttcggtaagttcttctgcggatctttcgtttcagcagctgttgtaccaaccaactcaaccccgacaaacgcaaaaacggcaatctggaatcctgccaagaagccttctgtacctttcgggaataaaccaccatgtgaccagacattactaatgctggcaacagcgccttgcggagcttggaaatggctgaaaatcatgtagccacccacgccgatcaggccaataattgccagaatcttaataagggcaaaccagaattcaatttcaccaaatagtcgtactgtaaggaggttaagacccatcacaaacaacacacagcctgcactaatcatggcctgctgtattggtgagaagcttgcaccatcgggtagccagaagctcaaatagttaataactgctgaaaggtccgcaatacccaccagcacccaacctaaccaataggtccaacccaaatagtaaccagcccaaggaccaatcaggtcatgagccatatcaacaaaagatttataatgcagatttgcaaggagtagttcacccattgcacgcattaagaaaaagaacatacctccaataatcatataaataaagagaattgaaggacctgcgagggagatggttttacctgagcccataaataggccagttccaattgcaccgccaattgcaatcagttgtaaatgacggttagacagttttcgttgcagatgatcgggagaattttccgtatctgaatgacgagccgttgtcatattaaaattcctttttgaattcctttgttaagatcagcaacctatggcgaaaattgaaccgtatgccataggtcactgaatctgttcaccaaaaaacgactggttaaaccgtatctatcttccttctgttagatacatcatcgtttttggagtaaaaacgaattacttttgtgctgccgtcacggcaatttcaattaaccaatttggattgaccaaatcggcctgaattgtggcacgcgatggagcaacacacccttttaaccagtcaacccaaattgcatttacggttgaaaagtcagaaagatttttcaaatagagctgcgcagagagcaaacgagatttatcggtattggctaacgccaaaagttcatcaattgttgcaagaatttcacgggtttgtcctgccacgtcttgctcggtatttttaggcacctgacctgacaaataaaccactttgttaaaaacagtcacggcgctcatgacttcgttagtgttaatcttttgtatatctgaattagacattcggatttccttatacctgattaataaattgaacacgggcggtgacagcacacatcagttcatagcccaccgtaccggatgaaactgcgacatcgtcaataggtaagacgacacctgtacttgattgaccccagagcaccacttcactaccaactttggcactctcaatacccgttaaatcgactgccaacatatccatactgacgcggccaactgtacgcgtgcgtactgaatccactaaaaccggagtacctgttggcgaaatacgttgataaccatcggcatagccacaagccacaattccaatcgtcatgggttgctctgcgacaaagtttgagccataacctacgctttcattcggctccaaatgctgaacggaaataatttcactacgtaagctcatggtcggctgcaagccccagtccgcaatactatgggttgggtaatctggcgagctgccataaagcatgatgccgctacggacataatctgatttgagctggtcttgataacgcagaattgccgcactattacttaccgatctttcacccggtaaatccttcacaatttcttcaaaggcagtaatttgataatcaataccttgctgaccgaaacgatcaccatctgcatccgaaaaatgcatcatgtgggtaatcttggcgacatttgccaaattatttaaacgttcccaagcctgcacataatgctgtggtttaaaaccaagacggttcataccactgttcattttcaagaaaacatcaaattgagcaggataaggatgctgttctacccactcaatttgcgcttcactatgaatggtgaaactaagctgatactgcacacaatcaaataaatcttgaggagaaaaaactccttcgagtaataaaattggacccgtccaacctagagcacgaattcgttttgcttcatcaagatcaagtaaggcaaagccatctgctgctttaaatgcttcataaacacgttcaattccgtgtccataagcattggctttgacaacggcaaagaccttactatttggcatagccttgcgcaccaccgccaagttattttgtaaggcttgacggtggatcactgcggtaataggacgaggcatgatttatttcctaacgtccgttaagccgcatgtgcgtgtgaataacgctgaattgaaaggccatcggtactaatatcagtcttatgattcaatacgatgtcactgattaattttcctgaaccacacgccatggtccaacctaaagtgccatgacctgtattcaagaacagatttttaaagcgagtcgcaccaataattggagtactgtctggtgtcattggacgtaaacccgtccagaaagatgcttgttccatatcaccacccgggaacaagtcttgagtcaccatttgcaaggttgcacggcggtcttcgtttagacctaaattgaaaccacttagctcagccataccacctacgcgaatacgttgatcaaaacgagtaatcgcaattttgtaggtttcatccagcactgtagattgcggagcaaaagcagggtcaacaataggaatcgtcaacgagtaaccttttacaggatatacaggtaactgtagatcaagcggtttcaagaaatcacgtgaatagctaccaaacgctagaacataacgatctgcagttaaaaccttgccatttacctgtacgcctttaatttgatcgccttcgacaatcaatttttctacgttctggttaaactggaaattaacgcccaactctttagcaatttgagctaaagcattggtaaataaatagcagtcgcctgtttcatcatttggtaagtgtaaaccacccacaagtttatcttgtgcatttgctaaagcaggctctacacgaccaagttcgttgccatttaataattcgtagcttacgccgcactcttcaagcacgctaatgtcgcgttgaaccgcttccatttgtgcttctttacggaatagctgcaaagtacctttggcgcggttttcgtagtgaatacccgtatcttttctgagttcacgtaagcagtcacggctgtattcagccacacgcatcatacgttctttgttcacagcataactttgtggattacagtttttcagcatttgcgccatccactgtaattgccacatgctgccatctaaattaatcgcaagcggtgcatggtgttggaacatccatttcacagctttaaaaggaattcctggtgctgcccaaggggtcgaatacccaggcgaaatttgacctgcattaccaaaacttgtttcttcagcaggacctgactggcgatcgagaacagtaacctcggctccttgtcgagccagataataggcacttgccactccaataacgccgctacctagtacaattacgcgcatttccattccctcacgcacaccagtttatttcactagtatatttctgcttcaatagtttatttcactgtttttcaggctataatctaggtaaatttatgtttttctcgcgagaattttaaaaaaagaggaaatatctatgcgccccttagatcgtatagatcgcatgattctggatattttgcagcgtgaaggacgaattgcgattagtgaattggcatcaagagtcaacctctctaccaccccctgttcagagcgtgtaaagcgccttgagcgcgatggcattatcatgggttattacgcacgtctaaacccagcctacgttgaccgtaacctgcttgtctttttagaaattaagttatctgccaaatctggcgatgtatttgatcaggtggctagagacttagttgagattcctgaagtgctcgaatgtcacctcatttcaggtgaatttgactaccttgtaaaagcgcgtttaaaagaaatgagtgcataccgccgcttattgggagatctattaaagaaactcccagcttcggcatcttcacacagttatgtcgtcatggaagaagtgaaagaaactctatatctcgatgtgagcaagtaaagcgagcattattgaactcgctttactcaccttttgaaaattagaaatattttaaaatcgaaatatgcttgttttgatgtttaaatttcgagaaccatttcaccactggatagagcacaaaagacagtacaatcgtaattagccacaacatccacacatggttgaccgacaaatagtttccgtagttagctccccacacactgagtgcgaacacatacatcagtttcaatacatataaatgcagtaaataaaagaacatcggcaccgaaccaaacacgaccaatggttttagaaatgaatattgctgtatacgttcaaaagcaacgagcacaagcaaaccaattccaacattcagcaaaataaacaataaagacggcggatacttggtgaggttaaaaaagctcatgaggctcagttgtaatgactcaaaatgttgccacgactggtcgccatagacattgataaaacgcagtaaaacaaataacccgatacttgctaaaccaaggctgagtaaagcgcggcttctttgctttgctgtatattttgaactaaagaactgacctaacgcatagcccaataaaatcacgccaatccaaggtaaaactggatagcttgtgcgaagcttgatgcctgcaatctcaatccaaccacgttcgtgtaaaacgaaccatatattctgtaggataccttgtgagaagtgcacagaatctaataagttgtgcccaaaaataatcaccaacgctacaccagcaagaacaggcaaaggcaaacttacacaacaagctagcaccaccatgctaataccaatcgcccagatcacctgtaagtaaatgacttcaggcggaaaagttgccgtccatgcaaagttcacaagggtaagctctaacacaattaaaaataagccacgctttaataaaaaagcacgtgtttgctgtaaatcttgtttttttgactgaaataaaaaagcagaaataccggttaaaagtacaaaaaccggagcacaaatatgggccaataatcgactgccaaataatgctggttctgttactgttacgtccattgggtcggtaacctgtttatgtaaatagaaagtttctcttacatggtcgagcaacataatgatgatcaccaaaccgcgcaatgcatcaattgactgtaaacgttcaatattcttttctaaagacatagcggtaatcaataaaataatgtaacgttatactattacatttaattccttttgtctttttatggctgattatttatgcgacacaaattaggattgttgtcttcgttaggtctatcatttatatcgacactcacttggggagaggaaacgtcaacggtacttgagaccatacgtgttcaggctgaaagtacccgagaagatgtgagccaaaatagctcggcaactaaatttactcacgatgttttagatgtcccttttaaccgtgcttatctttctaaacaaataatggaacagcaagacgtgcaacggattgatgatgcattaactttagtcagtggggtttttcatcaaaatagctttggtggtggcttttgggataactactcatttcgtggttttagtaccgaccccaatttaggtgcggctatgatccgtaacggtttgagtgttaaccgaggaattagcgctccaaaagatgtagtgaacattgaatctttagaatttttaaaaggaccaatggcggcgctatatggtcgcggcgaaacaggaggtttgctgaacctcaacagtaaaaaaccacagtgggaaagcgaaagtgaacttaacctacgtgccaatacccaagaacaatatcgaataagtctggagcatactgcccctattaacgatgaactggcctatcgtttagcagtggctcacgaagataatcaaagctttcgtgatcatgtcagcagtgaacgctggttcttttcaccacagctcacatggaaaatttcagaccaaacacaactcgactttgacagtgaatttacagagcataaaggaacctttgaccgcggtgtcagcacagtcaatcatcagtttgtgatggacccgaaaacctttacaggtgaacctgacgatggtgatttgaaaataaaagattacttttaccaattacgtcttagtcacgagtttaaccctgactggaaactaaatagtgcggtcagttataaagatgcacaaatggtcggctttgcaaccgaacctcgtcgtatgcaagccgatggccgcactctagagcgccaacgccgctatcgtgattatacaagtgaagatgtgctggctcagaccgagttacttggcaagattgatacctcatgggctcgccatgaaattttactttcaaccgagcttggtcaactcgactacaaacaaaaccagcttcgtcgcaaccacagcacggactcaccaaacacaattgatatttatcaacctgaatatggcaaatatttaccgaatctcactccgtttaccgacaccaaagagcgccagcgttacttcgcgcttaatgtacaagatcagttctttttcaatgaccagtggagtgtgttactcggtaatcgttttgatctggtcgaacaagactttaaaaatcatataaaacagaccgaagataaccagacacttcaccagaatagtccacgtttcggagtaaattttaaagcctctgagcaatgggcgttttatacaaactatggtcgctcatttgccatgaatagtggtatgaaccgaaatggacaaaccttcgctcctgaaaaaggcgaaagctatgaagtcggtaccaaatataaaataaacgaccaaagtgtgctgagtctcgctctgtttaaaatgaaaaaacagaatgtgctaacgacagacccgatcgacaaagactttcaaaccgcagctggtgaagtgagcagtaaaggagttgaatttgacttaaatagccaaatcactgaccgctggttcattaatgccaactatagttataccaatgctcaaattgaaaaagaccaagacttggcaaaaggcgctcgtctaagcaatgttccaaaacaccaaggctccgtaagcaccaattatgagattctacaagacggtgcaagaaaagcaggcgtaggtgccaaccttacctatgtcggtgaacgcagcggacataatcttgataatggctttaacttaccaagttatacgctggtcaatttaaatggctactatgcaccatctgaccgtttacgctatcagctgaatataaataacctatttgataagacctactatgtctcaagctatagcgatttatgggttcagccgggtgaaccactgaacgcctcaatttcggcacagtggaagttttaattcttctataaaataaaaaagcccgaatagtttcgggcttttcactagaacataccattttcattaacgagtggatcaggctgtatttgcccaatatcccaaaactccgcaatttttccattttcaaaacggcatatatgaaccacagctaaaattgttagcttgttattcatttgcatttccagtttagaatgtactgcaactaaagcgccatcttcaatgacatgctgaacttcaagaactttatttggagtttcaattgcactttcacgcatcccttccttcaaagaagtcttatcaccagcataataaggattgtgatgcttaaagtttggagcggtataattgccgtaggcttcatcgacctcgccagcagcagcaagctctaaaaaacgtaccgcaatttctttttgagataagctcattgtagaagctcccggctatatttaggctttactgtaaaatgtcatcttcttcttcgtcgaagacataagccatgcagccccacccatcatattcgccgttaaattgctcagcgattgtcgaaaaccactgctccagatcaacaatatccgaatactctggttccatcgtaacaaagatggtaatgatccattcattcggttcaacggaatcatcttggaaaagagaaattttttgctcttgatagagtaaatgcatcgcgcattgctctgcattttgctgatcttgaaatgcaattgaaaattcaatttcatgaagctcggttaaatcatccccgtcttcaaccatttgccaaagtacattgccgttatcatcatctggaaattgttcgtaatcgcggttcattagattgtccttgttgttgctctatttgtattattcggcattaagaataaccgacttttattgcagtttggatatgtattcagttgcgaattgcatcaaattttaattttttaaaaaggcacttgtgactcaatctccacatctgttcccttcaaaggatgttgaaaagcgagatatgcagcatgtaaagccatacgattcaaatgaaatcgtttaggttcaggatgatataacttgtcccccataatcggatgcccaatatgcatcatatgtacacgtaactggtgcgaacgccctgtcacaggttccagcaacacacgactttgatctgttgttgcatcataaaccaatggttgaaacaaggttttagcatgtttacctaattcaaaatgtacaatttgtcttgggcgattttcccagtcagtaatgagtggaacttcaacactgccctcttgttttacttggccttgtaccaaagcaatataatgttttttgactgttctggcctgaaacattttacttaccgcaacttctgcatcgcgatgcttggcaaacataagtaaacctgaggttgccatatctaaacggtgcgtaacctttgctaaagggaacttttccagcacccttaaatacgcactgtcatgatgttcaggtaaccggcccatgaccgacaacaaacccgcaggtttatcaaccacaattaaatcgtcatcttcaaataaaattgaaagcggatcttgtggtggagcgtaaacaaagttgtcgtttaaaggcatggtcgtagaaacagcaatggagcatggcggcaaatcataaagaaatttcagacctaccgcaaaataatctatagtgccctacttatgttccacgtgaaactcggaaaatctttatcgttttttattcatttcagctaaaagatcgagctgaatttcttgaatatgtgcaagtctttcccactgatgcgataaaagatggtccattttttcatgtaaatgacgaatctcaagctcggcttttaaattaatttgatagtcatgttgggaacgcaaacggtcttttgcttcttgacggttttgactcatcataataataggtgcctgaattgcagctaaacatgacaacactaaattcagcaaaataaagggataagggtcgacgggacggaccaccatcacaaccgtatttaaaacaatccaccccgttaaaaataaagcaaaacaaataagaaaagcccagctaccaccaaatgatgcaattttatctgccagtttttctccaaacgtccagttttgatcaaaatctgactctgtatttcggctaattaattcatgccgttgcatactgccaattacttcattttctaggttagataactcacccttttccgaccgtaatagggactgcacatatttaattcgataatctgctagatcggcccgacaaataaagcttgagtaactccaatctggatggtcttttaaaatttcatcactaatcacgttacggatgacttcaccagatactaaatcttttaaaggaaagctctttccacatacggcgcattggcgacactgatttttattctccatattatccagctcgcaattgatcataagattagtatataaacgattttgattgatcgcatcgtaaataaaaatagtgctctaacctaaaatctgtaaagtcgctgaaactatttttcggtgggcagaaatcacaggcttcatataatgagatttaaatgtcaggagtagcacagaaagattaggcttattcataaattatattcttgtaaaatatcatttttattattgagaattttttagggtgtcaagggaaaacatctatggtttacttcaacaatcataactttgtaagttataaccttgtgcctataaacttttgatctatagcgtcctaagccgaatcgagaccttttgggtgagtacacactaacgttatacgtttcggtgcatgctactcttttcgatccctatcacacccttgagatatagtttagccagcaccctgcgggattgtttttctaagaaaagcgaatttttattatttttgggaatttttacgccattaggcaaatttaaaagaatatattcccatttacctataattagttaaatttaaattccattttatttgtatttttcggtttattttaccaagtcattaattattttgagcaatggtccatcagactataaaagtaaattacccttcactttttagctgtgaagggcaaaattcttttataaagaaataaaaccattcttacgggcttggtaaacggtacataaagcgataagggcaaaagccagcataaaccacggaaaagaagccgccccaaaactttcaagcagtcccccgccaatcattccaccgaatgcgatagcaaggttaaatacagtgaccaacatagattgagctacatcggcttcgtgacccgcagtatttgccaaagctgtttgtaataaggttggtgcaccaccaaaagttattccccataacacaacacccgtcagtacactaaaacttgaagaactataaacacccaagagcgctgttgcgattgcaaagataaataagctcaaaagcgttatttttcttaatgaacgatcaataaacatacctgtaatgagaatgccaacaattgaagaaatgccgaatataaaaagaatggtctcaactttgtatgaatgccctgttgaagccaaaaatggtgaaatataagtataaagaatgctatgcgccaatatccaaaggaagacgactgctaaaacagctctaatgcccggcattaaaagaacttttaaaataggcaaccttttctgtgcagattgtcccgcaaaatcaggaatactaaaacgaatccagacaaataaaatcaatgccagtaaagacatgatccaaaacacaccacgccattcaaacaatgttcccaaccatgcacccaaaggaactccaattgataaagcaataggctgcccaactccagcgattgctaaagctcgtccttggtaggacgcagggaccatacgtcttacataacccgctaaaagtccccatataacacccgcagccatacctgcaatgaaacgagcaatcaaagtcagaatataatcatttgataaggccgtaattgcattaaataaaagtaaccctgcaatagcactgagtaataagggtctccgattccaactacgggtgaggctaataagcggtattgccgctaaaacagaacctaaggcatacactgctataagctgccctgcataagcttctgaaatgcgtaacccttgactgatttggggcaaaagccctgctggcatggtttctgtcataatggtcagaaagcctgcaactgtaaaagccaacaatttccaaatcggtaattgagtagagaattcatcagttaactgatgagatgtttcattactcttagtattcataaagctttactctcaaattcgcttgcagcgtacttactctgctctgtatcgctataagcttgttttataaggttaggataggaaggcatttgttctccatgtgaactaaaatcattattttggaatggacgttccaatttaagttaaataaaaaccttaactattcagctcaacaatagttaaggtttaaatgagttttataaaatgtttaaagcaacctcgaccacatccattaaacattgctttctttgttcatgaggactgcctttccctaaaacacgtaaaccttgcatcgtatttagaaagaaacttgctaatgcacgtgggttttgggtagaaccaatttcaccagattgttgagcttttattaacaaactctccaaagcatgttgaagtttctgtaaattacttacaacgaattgagagacttcttcgtcatgtccagccagttccaaacaagcatttgcaacgaggcagcctttatgttctgaatcattcaactcatcttcaaccaccctcatcagtaattgtcgaataagtgcttttgctgaacctgaaccagacaacagctttatattattaagtgtagttaaaagttcatagcgttgtaatgccttttgataaagcccttgtttgttttgaaaggtactgtaaaggctacttctagataatcccgtaccatcaaccaagtcttgaactgaagttgcagcataaccacgacgccagaagacctgcattgcagcctcagcaatttcatcagtttcaaattctttggttcgcatacacatgcctaataggaacgatcgttccaattaatttatgatataccaatacacaagtcaaactaataattcttctatcaatctatgtttagccaaataactcatgtaaagccgacttattaatcccgcttttaagtatttttattctttgcgtactattcttagagataacttttgcgcttgaatatattataaaaacatattataaattatttctaaccaaataattggttttttggaactttataatgaacaacaatattataatttttggttatggaacaggtatttccaaagccgtagcacataagtttggtaaagaaggctataaaatcgggttagtggcacgaaacgcccaaaaacttgaaaaggctattctagaacttaaagcacaaggcattgaagcttacgcttttgcatgtgatttagctgttcttgaagatataccaaatcttattaaacgtattaaagatcaattaggagagattaaaaatattcattggaatgctttccatgatattgaaggcaatattttagaaacccctccactagaacttactaaaagctttcatattcgagtttcgagctatattgcgacggtacaggcttgtttaggtgatttagagaagaaccacggtagcattttatcgacaaacggaatttttgctttcgatgcagtgggcatcgacttggttgccaaagaatattcatcgttagcaactaccgctgccgctcaatacaaggccactaacttacttgctcatagtcttgctgactcaaatgtttatgtgagccaagtgattgtaaatggtttcgtagatggcagacctgaagccaaagataaaacctacacggtacacccagaaacagttgcggagcagttctggtacttacaccaacataaacaagaaacagtttctctttgtggagaagccattcaagctgcttaaactatttctgatgtgagaagaagcgtaatcagttacgcttcttacaacttattgtacataaggccaaatatctgggtctatatagctctcatctatatggtaaccctcttttttcatattattttcttcagttttacgggcttttttattattagcaacttcagtttcaaatgcttgctttaactgctctgaattcatcttatctgaatcagagatagcatttcgccctgcatatttaaagttttcaaagctgtacctcaccatatactgttcttttttatcatctttataggtccgtcgaagactaatacccaactccacatccccattatacaaattaaataccaacctatttgttttcgaaagcacatcctgccattctttaaaatttaagatataagttggatctataacctcccccatagtttcagtcatatgctttagattatcttgtttatcaattcgagcactaaaaggtaaaaaatactgcttccattgtttgtcattaatctgatgtactaatttagtataagcagtataagcctcttggctcgtagtatattcatttggatgcaagctagcattaatgtccatgatttgaataccatcattgcttcgtcgagctacttgtgtacctagcacactgattacattttcaatttctaaattactcttttcactaaatacacgcactcgacctagtttcggtggagtccaatctaatgataaaaaattcatccctgcaggctgacgatcaactggtgtagtactatttttactaaaatcttgcatcccttgttcaccaaaatgaagggctattacatcttgattttggttcatcgacttatttccttgggtagtattatttgcgggtttacaagaagttaaaaaaatacatgtaataatgcagataaataaagataaatagtttttcataataagtttccagctctgtctagcatcaaaccttcccctcattactactcgaatgtattttaaaatcggctttactatttccccatttagaaatagttttcaattcttgttgtaaaaatggccgacctttttcatcaagcattaaacggtgatatttttcagctgctttaccaatccatttcatacgactatcataatcttcagcaatcgtacccttaagaggagcaatataaacatcctcttttaattctactaattgatcagctttactacctgtataattaccaaaccaattcttttttaccgcgtctacactataatcacttgatagaacaagtgtggcatctggcatacctataaaccaacgttgcatccatgcaccaaatttaactgagcaattttcccaaacaacgacttgaagaatattatgttgttcctgtaccgcaatagccatcaaatgatcgaatagattttgactcgcttttctatatttacttttctcatcacgtccattcaaaaaagctttctcaatggcaggtaatagagtaaaagcatcattaatttctttcgttacctttaaatttttaatactaggtaaacacgatgaccatggcaaattcattaatgctggtttaacaaatttgaaagtactagtatctcgcgtacctttacaactcttaaaagattctgaagatgcactccaagctaaatgccaaggagcaatatccataaacaaccacaaattgccacgagcaaaaagatttatagcctcttgtacaccgacattatagccaagcagactcccccaatgcttaaatatagttgcaactgtttttgaggcgaaagctcctaagcccatccaataatatcgccccaaaaggttcttattcccaccgagctctatttctaaaaatattttggcatatacggaggcaattcttcttgctcttgcctcatatcctggctcaagtttatagttattcgctttttgtaagttagataatctcttgatcgcttcttgctgatatatttcccaaaatgtcaaacagtcacagtgagcatccttacaactatgttcacttatgttcgttttactgttccaatccaaactgttagacatttttacttccttgcgctggatctacccaaacttcagtctcatctactgtttctagatctaaccataacaaatcgagcttaagctcctgttctttgggactatgtatttctttggtttgacctttcttatctgagttagcaaaaatttctttaccttcagaagatatcttgtaatcaataaatgaaaggggctcacctgaaggtaatagcatcttgaacctctcattataggcttcgtaagcgggtaacccttgaaggttcatacctacctcagctccccccataaacaaatgctgtccagccttcacctcaaacttgccgcttgtggtcataaaaatacctgaaccggtaattttgacttgagagccgcctgcggtaagaacaatttctttggctgcggtcgcttcgattttgtcttcagtcgaaatcacctgaacagctttacgggcaattaaatcagctccatcgccttgcgcctgtatttcgactttacctttgcctgcatacagtcttgccccttgttgcgctgcaaaaaggctaatcttattttgggcatgtgcaattaagttcttttgagtagacagattgatgctatctccggcagtttggttgagctgaccatctgcacttaagtgaatgtcttcgttactggctagagcaatactgttaggcgcagttaatatcatcaaagcttgcttaaaagcagcagctttgtcttgatctttctcttcaatttgctctatgaacgtttttaagttctcaagcatttccaatggatcagtttgctgatttttagcaacttcactaagtgccttggcattattgaggccgccttcgatttgttgcttggcctcacttgcatcaaggtgtacaccttgagcctgatcctgtttgtgggtactaatgagtaagccgctaccagctcgaaccgcgccccactggtcagttctgagttcaaaaccttccccacgaccatcactttctgccttgtcttttggatggcttaagttacccaagtttagctggctggccgcatggctactttgtagctgggcactgatttggcctgtggtgtcatcaaaacggagctgattaaagcctttgccatcaacttcttctgaacgaatgccgctgagttttttagtatcaggtaactgccctttctggtcgaattgcgttgggtggcgttcagcttcatgaatacgccccaccacaaacggacggtcaatgttcccgtcaaagaagtcgatgaccacaatttcaccaacacgtggcaagaaacgtgcgccataacctgcccctgcccatggggtcagcacatcgacccaagcggagtcagtgtcattgtcgttacttccagctccaccatcatggctgtggtcatcagctcgggtaaacaggaaacggactttaatgcgtccccactggtcgacatgaatgctttcaccctctaaacccaccactctagcgcgctgtgggtgagcggctggtcggtgctctagcggattatattcaggcacagctttgatgttacgacgaacgacattcagctcagcaaagtggcgctgctcagggttttgactgtcgagttgggctgccttgagtttgccttgtggtaataagcgctcaagttgctgttgtaattctttcggtaaattattctggttatagtagtgtttgcttaagattaagaactctttatcagcactgtcatgttggtcaagttctgggtggtcattgagttcaaaccagtaacccacttgtgcatcacggacgttgcctgcaacggtaaactgtttagaactcaagtgatggtaagcattgatgtgctggttaagctgttcaatctggctatttcccgaagcggtggcttgatcttccccgtttagatcctgcatccacgctgggctaacatgccatgcatcttcaaggttcaggcttgcattgtcatagtgttcgctgtgcttttgggtgccttgtacgctgccgctaccttcttcttgttgcaaagcatcggcttgccagcgttgcacatgaaccgaggttggttgtaaacgacgctcagctttgacttgggtaatggtatcaaactgttctgtcgcactgctgcgttgatagcggatgctacggcgttcaagtgcctgataattttggttatcgtcaattaaacgcaagacttgtggctggatagaagcatttgggtcagcgacaaaaagctgtgactcatcgaccagccagttaataccttcactacgccacaaacgggttaaaaagtcataatcgctttcgtttgactgcatcacaaatggacgcacatcgtagtctttagttaagccagatgtatcgagcgttatgcttgaggcaaataacgggctttttccctgccattccttaaacagaatttcactaatatcgcgcacgcttttattcataaacacgcgactattacggcgcttatgccagagtgcagttgggtcttttaaagttaaattataaatagtgagtgagccatcgctttgcccttggctggcttcggtaataatacctgtcgttctaaaaaactggcctgtatcggtgacctgatcgacggcaacctgacagccaataaactgttttaatgcaatatgggcgttcgtcgacagacacaataactcagcaacgctgccctgattaagcgtatgttcgccttcaatacgttgtaagaagacttgctgatttaaagactgatttgagaattggatatgaacagcacgattttgtgaaacaaggcctaaacgttccaatatactcgacacactcatctgcatttttattatcaatcaaacttatatttaagccatattttaattaaaaaaagactaatctgtctatctatactcattttcaaaatgtaactagtctaaatatgcagttttacgttaatttcttattaaataggtatttaaaccgtaaaattcgatcattttaaagtactataaatcatggagatattattaaatttttcaaataaaaatcaaacatatagcaagaaattaaattttaagattaataaaattcaggataagatatgaaaataaaaaagtctgctttttatatatttaccatgattttttcgcttcattcttcagcatttgctgagccgagtgttgctgatgttcaatatcgtgcacagcaaggacaaccgattgcgcaatatcatcttggcatcatgcttttaactggtgaacaaggtgttgttaaaaactatgaacaagcttttaaatggttaactgctgctgaccaaaatggcagcgtgggggcaaaatatagtttaggaatgatgtatttcacgggtacaggcgtagaaaaagacatgaaacgcgcttttgaatattttgctaaagctgcggataagggccatgccaaagcgcaatataacttaggggtgttatatgtcagaggtgaaggaactgcgcaaaattatgagcaggcttttgaatggtatagtcgtgctgcagagcaaggctatccgcccgcagaatataatttagctcatctatataaaaaaggtcacggcgtcgctcaaagcgatgagcaagcccttaagtggtacaccaaagcggctgagcataatgaaagcgatgcccagtacaacttggcccagatgtatttaaatggtgaaggcatgccgaaaaacctacaactggcaaagaaatggttccagcaagctgccgatgcaggtgattcggatgcgaaagaaatgcttaaaagtttagaataaggtattaaaatttaatgtttgtctagctctaataactcactaatttcttcaccatatagccatttatttaaaataccttctgaactttctaagcctacaatatctagaaaactttcaaatgtagttgccacttgttctcgatcttctgtatccaatttgtcaggatcgatttgactgattccatgagcaaggacatgtaaaagttctgctttagttggttcattcttttgttgatagagagcaataaaagcttgcgcagtatcagccactttgcgatttaaacttatagctaatgcaggctcttgaacacccgtatatagctgtccatctccagcaaaatgatcttgtgttttaaacttttctaattgttgaataacaatagagttagagttagagttttgaatattcatttctgttttattctcagtttgttgggcacaaccagcttgtgaacttaagacagccatgactagaaccaaaagctttttcatagttttattacttttatatttatctgcatccaatataaactaaattaattatgattttccatatccatgaggttttattttattatttattttttctaattaaacattaattctattattttaaaaacatatttatttttattattaaatcaaaaatattttaaatattaaattgacgtatttaaaatcaccgattattattccgttgctggcctacattgccagacggttttgacagaccgtaactcgtagcgaattgtagttctactataattcgttagacccttgcgtcccctttctttgcggtaggacgggagggggacgccccgcgcgtgctggttctacgagtccagtctgtcaaccccctttcgttctaccaccctaattaattcgcggtaatctggtggtagaactccattttttaaggagttgactatgccatttttcaaactcattttctctcttatttaactattttattaatttaaaatttgggtttttacgccctattttttaaatttatagattatttttattttaaaattttaattattttattttcctgtatttataggaggattaacttttatttaaaaattattttaatttcccaagcaattatattttttattttagttatacgtataaatactcatgagaataatatgaaaatttataaaccctttttggctttaagtttcatagtcggtagcttaggtgtggcaggttgtagccttcatgcccaacaggagtttgaaaaaatttgtctgtcaggtgggcatagcgaggccagttgtgactgtatttaccagcaacttgaaaaagcttattccccgaaaatgatgcagcgcctagaacatgtcagtttgcaaagtcctgttctcccacgggactttgcccctacttttttaagcaccatgcagcggtgtgacaaaagtagtctgggctaagcgttggcttagctctttatctctgtgtcgcaatggtgttgtactttaaatcagcgcaaaaaattaaagtctgttgtggcacagaggcctaaagatgaattcaaaataagataaataaaaggcgttcttgtacgttttatcctacaaacttttaaggtttttgcggattggcgacaccctacttttttcctaatatgaagtcatacaggaacaggatgttccggaacataaaacaacaataataggttcatgcatcaggatcgtgagatacgacaggagtcatatctagtacccaaatacgaaaaagcccaacaggatgttgggctttttttatatctgaatatttatgagtttttctttaagtcttcaatataagtggttgtgctgccatcccagtaacaatgtatacaacgtccctcttcaaaaatatgctcacaatttgcatatccataaattatagaagcgcattcaggacacaacgaggccatgctagatttactttttaaatactggcttccgcattcatcacatttttcacaaccactcagcatggatatatctcaatttaaaacaacgctatgagaacataatgataaattaaaaagcaatcttgtacgttttaacctacaaacttttagggattttgcggattggcgatgccctacttttttcctaatatgaagtcatacaggaacaggatgttccggaacataaaacaacaataatacgttcaagcaccaggagcgtgagatacgacaggagtcatatctaatcaccaaatacaagaaagcccgacaggatgtcgggctttttttatagtcatttaaaaatgattttacactcacctatagcggggtatgtgcctgttcttgctttttatggcgaatccaacgcaccacccaaataactgcaatcagtactactattgcaacaagcgcaggcaccagcatagctgaaactgaaagtaagattgctccaatccactcccctgtcgccacaacaaagttccctaaaccacctgtggttgcagttgaaacaccacgtgcagcgacggtactcatttgcaccacacctgccgtaccaccaccgacaataatggctgctgcccaactggcaaactgagacatttctccactgctaaccgccattgtcgctaatgtacccgcaatcatggccgcaggggtcgcgactgtgtctaaggcattatcgacccacgggatatagtaagctgcaacttcacacaccgttgccacgcctaaagccaaacacaccgatggcagagctaaccactcaaagccttttgatggctcaaaccatcccatcatggtggcgatgctcatgaccaatagcggtacaaacacgcgaaaaccgcaggcagcgctcaggcccacaccaatacataaacccaatattgtttccataacggtttccttctttatgcccatcacgggtcttgttatgtaagtcttatttttaaattaacaaaaagccccatcgggtgacagggctttttgttaaatgcgaacgcaaatattatttcattcttaacgtttaaattgcgtgcagtagcattttgtgcaaggtggtaaagggtcggtattaatttctaaaaacactctatgtccgcactgagcacagaaatagaagcctgttccgggtttttcgccagctgttaccatgattacattcctataatcgtatatatattaaacaggaatataacccagttaaagtgaatgtcaattgtccatttcgcccgatgatgatggcataaatgcaaaaaatgttatttgtacgatttatcttacacagatttagggatttagcggattggctgtcccctgctttttttctaatatggactcatacaggaacaggatgttccggaacataaaacaacaataataggttcatgcatcaggatcgtgagatacgacaggagtcatatctagcaaccaaatacgaaaaagcccgacaggatgtcgggctttttttatacgataaatcactttaaagaaaatacattcgaatcaaatttgccgcaataagcataagaataatagctgttaaacctgtcaacaaattgagtagtactttagcgatatttgataagtttgatttatagatcttaacatttataccataagcacttgctccaagagctccgccaatagcacctccaaccaacataagtacgagtggccagccacataatagatgcgctttaactggcaacttcctctcagcttgattatctaatttatttgttgtttccaatttttgatccttttttatatggatatttatctaaaaaatctattttaaatgcaattttttatgaggctatcaactctttttacacaatgtatagtaaaaaaccccatcatcaagatagggctttttttgaacaatatcaataatgtttaactaaaatattaagccacttggccttctaaaaagtcttgcgcaaaacgctgtaatacaccgcccgcttcatatacagaaacttcttcttctgtatctaaacggcaagtcacaggcacttcaagaatctcttctttaccatccgctgtggcacgttcaatcactaaagttaaagtcgaacgcggcgcaatattaccaatcacgctataaagctctgtaccatctagctttagagtcttgcggtttacacccggtttaaactcaagtggtaacacgcccatacccaccaagttggtacggtgaatacgctcaaaaccttctgccacaatcgcttcaacacctgcaaggcgtacaccttttgcagcccagtcacggcttgaaccctgaccgtagtcagcacccgcgataataattaacggctgtttacggttcatgtaggtttcaattgcttcccacatgcgcatcacttcgccttctggctctacacgcgcttttgaaccttgcttaatggtaccgtctgaacggcgaaccatttcgttatacagtttcgggtttgcaaatgttgcacgttgtgcagtcaagtggtcaccacggtgcgttgcatatgagttgaagtcttcttctggtacgcccattttgtgaaggtattcacccgcagccgagtccatcaaaatcgcgtttgaaggcgacaagtgatcggtggtgatgttgtcacccaaaatcgcaagcggacgcatgttcgccaaagtacgtggtgcagccaacgccccttcccaatatggtggacggcggatgtaagtactttgcggacgccaatcgtaaagcgggctcttcgcttgttcaacttcgcccaagtcaaacattggaatgtagactttacggaactgttcaggcttcacggcttgcttaactaacgcatcaatttcagcgtcagatggccagatgtctttgaggtaaatcgggttaccttctttgtcataacctaacgcatctttttcgatatcaaaacgaatcgtacctgcaattgcatatgccacaacaagcggtggagatgccaagaacgcttgttttgcataaggatggatacggccatcgaagttacggttaccagagagtactgcggttgcgtacaagtcacggtcaataatttcttgctgaatagcaggatctaacgcaccagacataccgttacacgtcgtacaagcgtaagccacaataccaaaaccaagtttctctaagtcttttagaacacctgcttcttcaaggtaaagtgcagccgcttttgaacccggtgcaaatgatgatttcacccaaggtttacgaaccaaaccaagttcattcgctttacgtgccaacaaacctgccgccacggtgttacgtgggttagaggtgttggtacatgaagtaattgcagcaataatgattgcgccatctggcattaagccatcagaacggttttcaactacacccgcaatgcctttttcttttaggtcgctggttgaaacacgtgcatgcgggtttgatggaccagcaatgttacgtgtaactgtcgatagatcaaaacgtagtacacgtgggtactctgctttggtcatttcagatgcccaaaggccgatttcttttgcgtactgttcaaccaatgccacttgagcatcttcacggcctgttaggcgtaagtagtcgattgtgttttggtcgatgtagaacatcgcagccgtagcgccatattctggagtcatgttcgaaatggttgcacggtcacccacagacatactgtcagcaccttcaccaaagaactcaaggtaagcaccaaccacacgctctttacgcaagaattcagttagagccaacacgatatctgttgcagtaatgcctgcctgacgttgtccaaccaactcaacaccaataatgtctggcagacgcatccaagatgcacggcccaacattacgttttcagcttctaaaccaccaacacccacagaaattacgcccaaagcgtctgtatgtggtgtgtgtgagtctgtaccgacacatgtgtctgggaatgctacgccatcacgcgcctgaatcaccggagacatcttctctaggttaatctggtgcataatgccgttccccgcagggatcacatcgacatttttaaatgcagttttggtccactcaatgaagtggaaacggtcttcgttacggcggtcttcaacagcacggttttttgcaaaagcgtctgggtcagcaccaccatattccactgctaaagagtggtcgacaatgagctgtgttggtacaactgggttaactttagatggatcgccgcccttctcagcaatcgcatcacgcaaacctgcaaggtcaaccaatgcagtttgacccaagatgtcatgacacaccacgcgtgcaggataccaaggaaagtccaagtcctgacggcgttcaatcaactgcgttaaataagcagttaagttctcggcatcggcacggcgtaccaattgctctgcgagtactttagaggtgtaaggcagtttttcgtatgcgcctggctgaatatcttcaacggcttgacgcacgtcgtagtattcaagctgggtacctgccagcggtttacggtattttgtgttcattaaccacgctccgccaatggtttaaattcgaggttttcagggcctgtgtagttcgcgcttggacgaataattttgccgtcttggcgttgttcaattacgtgtgctgaccaacctgctgtacgtgcaattacgaataatggtgtgaacattgcagttggaacacccattaagtgatagctcaccgcactgaaccagtcgaggttcgggaacatgtttttcacttctttcatcactgcttctaaacgctcagcgatgaggtacattttggtgttctcttgcgcttctgctaagtcatgcgccactttcttgatcacttcgttacgtgggtcagaaactgtatatacagggtgaccaaaaccaatcacgacttctttattttcaacacgtttacggatgtccgcttctgcttcatctggattgtcgtaacgttgttgaatcacgaatgcaacttcgtttgcaccaccgtgcttaggtccgcgaagtgcaccaataccgcctgtaattgccgagtacatgtcagaacctgtacctgcaaccacacgtgacgtaaatgtagacgcgttgaactcatgctcagcatacaaaataagtgaagtatgcatcgcttgaatccactcttcacatggtttttcgccatgaagtaagtgcaagaaatgcgctgcaattgagtcgtcatcagtttcaacttcaatgcgacgaccgttgttgctgaagtggtaccaataaagcagcattgaacctaagcttgccattaatttgtcagcaatgtcttttgcgccagcttcattgtggtcttcatgttctggcgttaaacaacctagaactgaaacaccagtacgcatcacatccattgggtgtgcagacggtggtaattgttcaagtgcagttttaagtgctgccggtaaaccacgaagtgcttttaattttgctttatatgctttgagttcagctttgtttggtaatttgccatgtacgagcaagtgagcaacttcttcaaactcgctacctgccgcaaggtcaagaatgtcatagccacgatagtgcaagtcgttaccgctacgtcctacggtacatagtgctgtgttgcctgcaacttgtccgctaagtgcaactgatttttttggtttgaagcctgttgttgtttcatttgagctcataagattgtcctttcctatctatctgaatttatttattaagcacgatggagtcgtaccattttcacttcttatttctttttagcaaatgcgttgtctaagtagtcttcaaacgcgtagtagttaatgcgttcatataactctttacgcgtttgcataatatcaaccacattcttttgcgtgccttctttacgcaaggtttcatacacagtttcggctgccttgttcatggcacggaaagcagaaagcggataaagcgcaaggcttacatcagcagatgccaactcttcagtggtaaatagtggtgtcgagccaaactcggtaatgtttgccaaaattggtacgcctgtcttctgagcaaattgcttgtacatatcaagctcggtaattgcttcagggaacaacatgtctgcacctgcctcaatgtaggcacccgcacggtcaatggcagcttgtaggccttcaaccgctaacgcatcggtacgcgccataatcacgaagctgtcatcaccacgcgcatcgaccgcagctttaatacggtcaaccatttcttcttgagtcacaatggctttattcggacggtgaccacaacgttttgcacccacttggtcttcaatatgcattgccgcagcaccaaacttgatcagtgcttttgtagtacgggcaatgttaaatgcagaagcaccaaagcctgtgtcagcatcgactaataatggaagatcacatacatcagtaatacggcgtacgtcggtcaacacatcatcaaggttactgattcccaaatcaggtaagcctaaagaaccagctgctacaccaccacctgataagtaaatcgctttataacctgcacgttttgccaaaagtgcatgattggcattgatggttcccaccacttgtaatggcttttcttgggctacggcatcgcgaaatagctgacctgcggattgtttagccattgttatgttctccttgtgcttgtagcagtgtttgctcaataattttgtaagaagcattgatatgtcgatgcatgagcagctcggcaagttcaccatcgccttctgcaattgcatctaaaatacggatatgttcgtcccaagctttgctcggtcgatcgggtgtgtttgaaaactgaattcggtacatacggatgagatgataaagctcatcacatagcattttttctagggttttattgccactacttttgataatgcagtagtgaaaatcgtcctgcccttcttgcaagtaatatcctttacctgctttaaagttttcatcttcggcatgcatacgcaatacatcacgtagcgccaaaatttgctttttatcaatatgctgggccgcaagtttgcaagctaaaccttctaatgacgcacgaatctggtaaagctctttaaactgttgcagtgagagcgaaaccacacgcgcgcccacatgtgcagtacgctcaaccagtcgttgaccttcaaggcgatgaatcgcttcacgcaaaggcccacggctaatgccgtaagtgcgcgccagttcaggctcagaaattttgctacctgccggaatttgacctaaaacaatcgccgtctgtatttgcttaaatacatgctcggtcagtgttcttccctgactttgtaatggctctggtgcgaaggtcaaatcttgcatattgtcgacaatttttaatcaattatgagttttatagcgggatgaatgaaaaaaatcaaggtgattgttgacacttttcagaacgcatcaggtcaatttttatcgttcggcctgttacctcaccttatatttaaaccattaaaccacttacaaattagtctttataaaacatatatttaatattattttacctatagatttatgatacttttttagttgcttttcgaccgctaatcttttgtttcaaactttagtctacaaccaatgtattacagtaagattgtagacaatctgcttgaatgaaagcatgagttagaaattagtttctatttaccgtaatttcttttaaatctttttatcattttcatccagaaaatatcgatattagtgaaattatcaggtgcttcacggtagctttattgatacattattgagcatcgacatagttgtggcgtatttttcgagacagaaaaaacccagcactatgcatattgttgaatgaaaggacttttttgatgtttcaacatatccccccatacgcaggcgatccaattctctctttaatggaacagttcaatgctgatactcgttctgaaaaagtaaacttgagtattggtctttattataacgaagacagcattgttcctcagttagagaccattatcgaggcacaaaagcgtattgagcctaagaacggtaaaaccaaactttatttgccaatggaaggcttcaaaccttaccgtgaagcaattcaagcacttttatttggtgcaaacagcccagcagttaaagctggccgtgctgtaaccatccaaacgcttggtggttcaggtgcattgaaagttggtgcagatttcttaaaaacttatttcccaaattcagacgtttgggtaagccaaccaacttgggataaccacgttgcgattttcaatggcgctggcattaagactcatttctacccatatttcgatgcagaaacgcgtggtgtagattttgacggtatgctttctacacttaaaattttgcctgagcaaagcattgtgttgttgcacccatgctgccataacccaacgggtgctgatttaaacccagcgcaatgggaccaagtaattgcagtattaaaagaccgtaaccttattccattcctagacatcgcttaccaaggttttggtgacggtatggaagaagatgcgtatgcaatccgtgctttagaccaagcgggtctaaacttcattgtgagcaactcgttctctaaaatcttctctttatatggcgaacgcgttggcggcttaactttcgtatgtgacgatgcagaagctgctcagtgcacattcggtcagttaaaagcgactgtacgccgtatttactctagccctcctacaacaggtgcttggttagttgatgaagtgttaaatgacgctgaacttaaccaacaatggcaaggcgaagtgaaagagatgcgtgagcgtattatcaaaatgcgtagcatcttgaaagatgaactcactaaagcgttaccagaccgtgactttagctaccttgtaaaccaaaaaggtatgtttagctacacaggtctaactgctgagcaggttgatatcttgcgtgaagaatatgcaatctacttagtacgtagtggccgtatttgtgtagcaggtttaaacatgaacaatgtttacactgttgctaaagcaatggctgaagtgcttgctaaatcagtcgaagcagcataaatcatctattaaaaaaggcgcttcggcgcctttttttatgtctcgatattaagatttagccttaccccaatatttcagttttgaggtatggccaatacccacattaaaactgttggttgggtcgagtttttgatagaaattggctaatgcaggtttggcaatgtaaaggtgcccaacattatgctctgccggatattcagcacggcgcgcatcgagtaatttccacatttgatgttccatttctaacgggtcattaccctttttaagaatatagtcctgatggaacacatgacaaaagaaatgcccataatagagtttatggatgattttcttttccatctcggctggtagttgctctacccattcacggtcattacggcgtagcgcaatatcaagcgctacaatatcttcaacttcactacggtgcgtatcacgataacgaattgccgcccctgcaatcgcaaaacggtgtaagaacgcctttcgcccctcttcttcgctacatacgaaatagttgcctgactgatgcactgcaaaatattcttttaaaaactgctcggtctgagcttttgaattattttcaacacgtaacactaaatggtgctcataacgatctcgatattcggtcatacgcttaggcaaatgactcggtaaaaagaaggtaatcgcctgtaaaatctggtctgttaaacctttaattttaaatttttctaaaaagccatcgactttatctttcatcgcaaaggcttttggaacattggctgtaccaaacttttcaataaataagaaggtgtcttttccgtacttttcaccaatcaagtaagcgtctcgatgaatatattcacccgcaattggcaagcttggcagtgaggtcagtaagtagcgacgaatagccgttaaatcatcggcatcattactaccaatataaaaaacactgctctctactttttcataggtatcaaggcgtacagcaaacacacagaccttacctgccgaacccgaggcttcaaacaaacgtgacgggtctgcattaaaacgagcaggcgtatcttcatcgacctgagtcacgtcgtacgcatagcgatggtccgatgcctgcttttcgttgtcatctaaaatatctacggcttggtattgctgcttctctaaacgagtcaaaatttcttcgggtgtcgagcctaaattcacccctaaatgattcaccagctctaattgaccagcagcattgacctgagcatataacgccagttccgtatacgcaggaccacggcgtaccagtgcaccaccagagttattacacacaccgccgagtaccgatgcaccaatacaagatgaaccaatcaccgaatgtggttcacgattatagccttttagaatttgttctaaattatctaaggtcgcacccggtaagcagatcacttgcttaccgtcatggatgacttgaatcccctttaatcggcgcgtgctcattaccaaaacaggacggtcataatcatcgccatacggagttgaaccaccggtcaatcccgtattggccgcctgcataatcacaatacagtccgcctcaattgcagcctgcaacacttgccattgctctagcaaagtccctggtacaaccactgcaagcactttcccctctccaaaacgacgaccttgacggtactgacgcgtactttggtcatcggtcaaaacataagaacgccctacaatattctgtaaatgttcgattactgcttgaggagaaaatgtttgcatgatggtttccttttggtcatccctaccacatagttttttaaaaatcagaaaagctcaaaggagtttttccatttagaactaatatttaaagtagctaattccattacttttgttttggcaaaagtaatcaaaaccattgtcacttacagaacctattcgctgtatccatttttcaatttacattgcaaaaacaaaactttgctcataccacgcaggctgtaagtgacgcttagcactagcagctaatctctaggtgttagatttaattcaaattggctacgcgttggcggcatggatgccgcctgttgagcaactgtacaaggaagtacggtttgctcaacaaaaggtttttggttacttttgacctttcaaaagtgacaaatgcctatataaaacattagcaaatcaccaaattttaaggctgtgcttaccgcttcacttactatgtcttaaagaccttgtttaatcgcctgtactaaacaatccgcattaatatccgaaatcgacttagcacccgtgagcgtcatcgcaacacgcatttccttatcaattaaatcaagtaagttcgacacaccttgtccacctgctgctgccaaggcataaacaaacgcacggccaagtaaaactgtatcggccccaagcgccaacatacgcactacatctaaaccattacgaatgcctgagtcagccaaaatcgccaaatcacctttaactgcgtcggcaattgcaggtaatgcacgagcagatgacatcacaccatctaactgacgaccgccatgatttgataccacaatcccgtcagcaccaaaacgcacagcatctttggcatcttcaggatctaaaatgcctttaatcaccattgggccatcccaaaattcacgtatccactcaaggtctttccatgaaattgatgggtcaaagttcgagcctaaccagccaatatagtcttcaagcccagtcggtttacctaaatatttagagatattcccgaggtcatgcggacgtcccattaagccaacgttccatgaccagtgcggatgaaatactgattgcatataacggcgcatcgcagcatttggcccactcatacccgaatgagcatcacgataacgtgcacctggtacaggcatatctacggtaaataccagtgttgaacaacctgctgcttttgcacgttccaaagcattacgcataaaaccacggtcacgtaacacataaagctgaaaccacatcgggcgattaattgcaggtgcaacttcctcaatcggacaaactgaaaccgttgaaagcgtaaatggaataccttttttatcggctgccattgcggcttgtacttcaccacggcgtgcatacatacctgttaaacccacaggagccaaggcaactggcattgacagcgtttcattaaacagttttgtctctaaactcaacgcggacatgtcattcagcacacgctgacgcaatgcaatttctgacaaatcttgtacgttacgctttaaggtatattccgcatacgctccaccatcaatatagtgaaataaaaatgggggtaagcgacgttgtgccgcagcacgataatcattgccagaagaaataatcattttgaatcaactctatttaaacggtttgcacgtttctggcgagcttcgtcttcatccagagaacgcacatgattaatcacaaattcaatatgaccgcagacagcttggcgtgcggcctcgggatctttacgatcaatagcatccatcacctgaaaatgctgctcgctgagcaagtcaccatttacggggtcgttataaacttttttacgccctaataagacgttgtattgcagcaaatcaaatagacttcgcatcatttgaatcagcaccacattgtgagatgcttcagcaatcgctaagtggaattcagcatccgcgaccgcagcctgtgctgagtcacctgcattttggtggcggctaatttcattaaaataatgatgaattttggcgcgatcttctggggtcgaacgtaacgcggcataccatgcagtccccccttcaagtaccaaacgcgcctcttgcacatcaaaacggtataacggatcttcttcaatcaggttactaatcgggttcacaatcagttgctgtggccattgttcaggtaattgctgaatataagttccatcgccacggcgactaatcagtacaccttgactattgagctgttgaattgcttcacgcaaagacggacgagaaactcctaagctagttgcaagctggcgctcggcaggcaaacgatcaccttttttcatgtgacgctcttcaattaatgcctgcaatttcatgaccacttgatcggagattctcatcgcgtttccttcactggagttatggaatcatccacggcaccagataagcctgaaccgtaataatgatgccaacaaagacagtgaatatgatgctatgttttaccgtgaaacggaacaagtcagattcttttccaactaaccctaccgctgcacaagcaatggcaatcgactgaggagaaatcattttacctgtcacaccaccgctggtattagcagcgaccaataacacttccggaataccaatttgctgagctgtagttgcctgtagtgccgagaacaaagcatttgaagaagtgtctgaaccagtaaggaacacaccaagccaacccaaaaatggcgagaagaaagtaaacgcatgacccgtatgcgatagagccaaagccaaagttgcagataaacctgaatagttcgcaataaaagcaaatgccaacaccataccaatcgagtaaatcggtgtttttaactcattgagcgtttcaccgaaggttgttactgcctcacttgctttcatttttaagaaaataactgtgatgatcgcagcaataaaaattgcagtacctgttgcagagaaccagtcaaacttataaatcgcttcgtatggtttcatctcggacacaatcggtggcattttctcgaccaatttgtgtaaatacggcacttcaagcttaaaaatccagtgttcaagagcgccatcttttgcaaataatgctttaaatggcttaacgctccagatcgtgaccattaccgttaaaatagcaaatggagaccatgcctttgcaattttcccaatactataacgttgaactgttgtaggttgctgagtcaaagtctgacccgcttcaggttcaaaacggaaaatatgttttggtttccaaacacggaataacaacgtcaggctgaccaatgaagcaattgctgcggtaatgtctggtaactcagggccaataaagttagaggtgagatactgagcaatcgcaaaagcaccaccaccgaccaataccgcaggccaagtttccttaacaccacgccagccatccataatcgccataatccagaacagcacaataatggttaaaaaaggcaactgacgacccaccatctggctaatttccatagtgtctacaccggaaacctgccctgccacaataattggaatacccattgcaccgaatgcaactggtgctgtatttacaattaaacataaaccagcagcgtaaagtggcttaaaccctaaaccgacaagtagtgcagcggtaattgcgacaggagcaccaaagcccgctgctccttcaaggaaagtaccaaatgcaaaaccaacgagtaacatttgcagacgttggtcttcggtaatagatagaatgcttgagcggataacttcaaactggcctgtttttaccgaaatcttgtatagaaaaactgccccgataatgatccatgaaattggccatagaccgtagaagaaaccgtaaatgattgacgcaaaggccatttgaccaggcatttgatagaaaaatagcgcaatcagtaatgcaataataactgtgcccgtacccgcgatactgccttttaaacgaaaaacagccaaggccaaaaagaagaaaataatcgggattaatgcaaccgcactagacagccaaatattatttaaagggtcataaagttgttgccacatattgagcattgtcatctccttgaaatgccggggcgaatttttgtaccttaaaatttcaacatttaacacaattggtatgaccaattaaaatttaagtgcaaatgctattccttaaaccacaaggcgcatcataaacacagttattggtaagatcaatggttaaataattgtcataattggtatgaccaatatagccaagaaaaatcaagccatttctcatctataattttttttattcgactaaagtcgtaaaaagcttccttataaacttaaatatgacctacagaaatgaagtatttgaatataaaacaataaacataaccatttattggtaaatgtataataatgcccaaaacttaaatcatttgtattgaactgaataatgactactttaacctgttttaaagcttatgatatccgaggcaaactcggcaccgaattgaatgaagaaatcgcctataaaattggccgcgcttacggacaaatttataaaccaaagacggtggttgtaggttgtgatattcgtctaagcagtgaggctttaaaacaagcgaccatccgcggtttaaatgatgcgggtgtgaatgtgtttgatttaggcatgacgggtactgaagaagtttactttgccgcttttcatttagacgtacaaggtggaatagaagtaactgcgagtcataacccaatggactataacggtatgaaattggttcgagaaaatgctcgtccaattagtgccgataccggtttaaaagaaattcagactttagcagagaccaataactttgaagaagttagccaaaaaggtacaacgcaaagctataacattttgcctgagttcgttgaccatctactgacttatattgaacctacaaaaatccgtccattaaagttagtggtaaacgcgggtaatggtgcagctggtcatgtgattgatgctattgaagaaaaatttaaagcacttaacgtaccggttgaatttattaaaattcatcatgaagcagatggtactttcccaaatggcatccctaacccaattttaattgaaaaccgtgacagcacccgaaatgctgttcttgagcataaagcagatatgggtattgcatgggacggcgactttgaccgctgtttcttgttcgatgaaaaaggtcagtttattgaaggctattatattgtcggtctattggctcaagctttcttgattaaacagtcaggcgaaaaaattgtgcatgacccacgtttagtttggaacacatttgatatcgtagatgaatataaaggtgttgctgtacagtcaaaatctggtcatgcgttcattaaagacgttatgcgtgcacacaatgccgtatacggtggtgaaatgagtgcccaccactatttccgtgattttgcttactgtgacagtggtatgattccttggttactcaccattgctctactctctgaaacaggacaatctctctcaacactcgttgaaaatatgattgccaagttcccttgtagtggtgaaatcaactttaaagtagccgatacgcaaactacgattcaaaagattttcgacttctatgccgatcaaaatccacaaattgaccgtaccgatggggtaagcctcgactttggcacatggcgttttaacgtacgcgcctcaaacactgaacctttgctacgcctcaacattgaaagccgtgcagaccgtcaagctcagccaatgcagtattatatagatgagttgacgggtttaattcagaactaattaaaaataaaaaaggagcaaatcgctccttttttatccgaatctaattgtagccattaggattctgcttttgccaattccagctatccttaagcatatcttctaaaccgtattgaggtttccagtccaactcagcaactgcacgagcattgtcagcaaaagatatcgctacatcccctgctctacgtggagcaaactcaaaagcaacaggtacgccattcacttgttcaaaggtatttttgacttgtaaaacagatgaaccattacctgtaccaatattccatgcacggcaaccttgcgcctgtaaacggttatttaaagcgcatagatgtgcattcgccaagtcaacgacatggatataatctcgcacacctgtaccatctactgtgtcatagtcattgccataaatagataatttttcacggcgaccaacagcaacttgagtcacataaggcattaaattatttggaataccttgtggatcttcaccaatacgcccacttttatgtgcacctactgggttaaaataacgtagtaaagcaatagaccatttagagtcagctactgaaagtttttgtaataattgctcaacaattagttttgtatatccatagttattacttggcatacctgttggcatttcttcatttaaaggagaggtatttgcttcatcatatactgtcgcagaagagctaaatactaatgtataaacaccagctttctccattgacttcaccagttgaatactgcccgcaatattattatcaaaataaataagcggtttttcctggctttcacctactgcttttaaacctgcaaaatgaataaccgcatcaattgtatgctctcgaaacactcggtcaagctcgtcagaattccgaatatcaccctctataaaagttaaacttttttgagtgatctcttgaactctatttaaagactcttctgagctgtttgagagattatcaaacacaataacctcataaccaacctgcaaaagctcaacacatgtatgtgtcccgatataacctgcacccccagtgactagaattttagccatctacctttcctaacaatattttaattaacccccgtgtcgaggcatcaagttttgaaaaatcattttgaacaccatttaaaatgggaagtaactgatcagcaatctgtttacctttttccaccccccactgatcaaatgggttaatgttccaaatcacagactgaacaaatactttatgttcatataaagcaatcagcattcctaaattatacggatttagctcatctaataataatgtagaacttggttgattaccttcatattgtttataaataggtaaattctttaattcagctgcatctaaagcttcattgccaaaagccaataaacgtgattgtgccaaacaatttgataatgcaaggtgatgctgctcaatcaatgcctcagcattctctacataggtaaagtgatctgcattataacgttgaaccggtgcaataaagtcacagcttactgcctgtgttccttgatgtaagagctggtaaaatgcatgttgtgcatttggaccaacctcgccccatacaatcggacaagtatctaattcaactttttggccatcacgttgtaccgacttaccattagactccatttcaagctgctgcaaataagcagcaaaatactttaatcttccgtcataaggtaatactgcatgggtctgaatatttaaaaaattattattccagataccgagtaatgccatgagaaccggtatatttcgctcaaagcttgtattttgaaagtgttcatcgacagcatgtgcaccagctaaaagctgctgaaaaccatctataccaatcgttagggctataggaaaaccaatacaagaccaaagagaataacgcccccctacccagtcccaaagtagcaactgattatcaggagcaataccccactcagtcattttttcagcttttgtagatacaccaatgaagtgactttttacaacacgatcatgctttcctaaagctttttcaagccactgacgaactgtttgtgcatttgataaggtatcaatggtaccaaatgactttgaagaaataataaataaagtcgtttccggacgcagttgatggagcaagtctgataactggctaccgtccatagttgaaacaaagtgtacattaagtggtttggctgtttttactttaaaatcagctaaagcatgagtcaccatgtgcggccctaaatcggaaccacctactccaatattaacaacatcctgaatcacttcacccgtagcgccacgatattgcccagcatggattttttcaaccaaagtgtacatacgctgtaattggatatggacctgttttgcgagctccggaaatttcgaatattccgagggtaaacgcaaagcccaatgcattgcttcacgctgctcagtacaattaattttatcttgcgaaaaaagacgattaatccactgtgttaattgtttattgtttgcgagagcaactagttgttccaaaatatttttggtaatacgttgtttgctataatcaaaaaataactgatcaaattttacagaataattttgaaaacgttctggctctaaagcaaaaagctcttttatatgtagttttgagtttttctcaactgaagacttaagctgtattaaaggtgagcttaaatcctttgggaattgttcaattgatttactcataagcgtccaactccttcgtaagcaaaacctctagcctttacatatgctgggtcataaatattacgcccatctaaaattaaaggatgcttcattaactgttgtagtcgcttaaagtcaggactccaatattgtttccatgcggttactaaacataaagcatgagcattttgtgcagcctcgtattgatcactacataaaataagatcttcccgagagccatatattgaggcaatttcatctagagcctgagggtcatgtaaacgtacttttaccccttgcgcccataacgcagccaataaaatatgaatgggtgagttatgtatatttgaagtattttctttaaaagaggctccccaaatcgcaacagttttaccactcaagtcacagtgataataattccataacttccggaacaaaatttctttctgttgctcattaatagcccagacttgctccaaaagtcggctttttgttcccgtttctaacactgcgcttgaaagtgtcaaaatatcatgcgaaaaattctcaccgccaaatcccacacctggtgataaatatgcggcaccaatacgtgtatcagcagcaataccatgctttacatttgcaatatcaataccgagtttttcagcgaccatcgcaagatcattcatatagctaatacgagtagctaacatgcccgaaatactaagtttggtaaactcagcatctaaaatcggcataaataagtattgataactaaattggaaaaaaggacgcaacaattcctgcataatttcacttgcgtctctagactctacacctacaatgacatgttttacatctagtacactattaattgcattaccttcttgaatcacatcagggaaatacacccattcatctttcggcaaatgctgttttaatttctctgtaccatgtaaaccaaaagtagagccattaatcattaatttaggatgaataattggccgttcacttagtttttcaacagtttttaaagcaagttcaatttgtgtaggactaaaacaaaataaataaacttcgatatctaaaggaatttcagaaaaagggctttctttcaagaaaccagcttttcgctgtttgtttaaataatgatttacttcttgatcttgatacgaaagtacagaaatattttcttcacaacttacacaggtacaccaataaatttgattaccatattcagccaataatgcggccattacaccggcatgtaacgtcgttccaaatactgcgattttcattgcacacctgattctttagtattttatagatttctcttccttttacaggaagagaatatactgctctgtttttatattcattcgtttttacaaatacttaagcagagctacaaaactttataatttaagttcttgaatcagctgtttaaattccattcctaattttggatgttctaagccataatgtaatacagcttttaaataaccaagcttactaccacagtcaaacgtttggccttgcatacgataagcttcaacagtatctgtgtcttgaagcattgcaattgcatcagttaactgaatttcattacctgcacctttcggcgtgttctcaagtaattgcataatcttggcaggtaacacatagcggccaaccacagataggtttgatggtgcagcgcctactgcaggcttttcaacaataccctgcatggcaatactttcacccacatttgggctatgctttacatcgacaatcccatattgatctactaaatggtctggcactgcctcaaccatgatttgagcagcttggcttgagttataacgagaaatcatacgagataaatcattttgtccagagccatcttttactagtacatctggtaatagcactgcaaaatcatcttcgccgacaacactctttgcacataaaacagcatgtcctaaacctaaaggttgaggctgtctaacacttattacacttacatgctcaggcacaatttgtgtaatctctgcaagtaagtcgaattttttcttttgttctaaagtcgtttctaactcaaagttcctatcaaaataattttcaattgaggctttcgatgaatgagtgactaaaataatttgctcaattccagcctctacagcttcacgtactacatattcaattgcaggacggtcaactactgttaccatttctttaggaattgacttacttgctggtaaaaaacgtgtgcctaaaccggcaacaggtaaaactgcctttttaatcatatgagtagttacttactattataaacttgctttgtcttcatcacgcgctgaaccagaaaagcggcttgcacctactaactgatctggagcattaattccttcttttttcaacataaccaagactgttttcatcataattttaaagtctaaagataaattatgggtttcaacatactcgatatcaagttcaaatttttcttcccaacttaaattatttctcccacttacttgagcaagacctgtcatacccggtctgacttcatgacgacgcatttgtcgagaagtatagtgttctagaaagtcggctaactgtggacgtggacccacaatgctcatatcgccttttaaaacattaataagttgtggcatttcatctaaagtggttgagcgcagcttatgcccaaatggagtaatacgctcttcatcaggtaatggattaccctgtgcatcaaatgcatctttcatagaacggaacttaatcattttaaataattttccgtcttttcctggtctttcttggtaaaagaaaaccggagaacctaaatttttacgaaccttatatgctacccaaataaagattggggacaaaatgattaatgcggttaaggaaattacgatgtcaactatccgtttcatcatgtattcactcttattttcaatgggttttcaaagaaaactaaaaaatatgcaatagttagcatctgtctctcacaagacgatttatacaaacatactatcatagattagatgacgtaacttttaccttatgacaaatcgtactttaatgttacttatgtattgtctaatgaaatgaagcctctctttttacactattgtaattaaaaaacccaaaaacatataaacaacttattgatattaaaaatatttttttatttcgagtttctctaaattattttatttttgataatttatatccttgtatttccacatttttgaacaaaaagaaacatttctttaaaaaaatatagcttcttttatcagtttaataaaaaaatgattgtgaaaaacctttaaattataaaaagatatattcattaatttttatgttctaactgtcctgcattaaaataaatagctaaaattattaaaggaaaatatgcgattattaaaccgactaatggagaaattgctttatttaatacaaaaaatgcacaaggtaagagccatataagattaatgattaaaactgctaaagttacgggtgtatgactatcaaaatacctagcagcgtattgataagcgtggcttcgatgggcttgatatattttctcccctcttagtattctccttataattgtaaaggttgcatctactataaaaactcctagacaaatgatccaagctagaaataacttaaagtctatttttaaagcatataaagctaatacagcgaataaaaaacctaaaaaactactacccacatctcccataaagattttagcttttggaaaattccatacgagaaaaccacagacaatagaagtgattgcaagtaatataaaattattgatgtcataccaactgtataataaagctagacttagcccgactgatattgcttcgatacttgcaatgccattaataccatccataaagttatataaattaagcagccaaaccaaaaaaagaatagcaagaatgttggtaaaaaaacctaagtttaaattattaaaaacagagacttgggcaaatccatctaaactaaatacgataaatgttgcagtaataaaatgaatgcttaaacgcaacatagaattgatatgagcatgatcatcacaaaaaccaaggagagcaataagcaaacaactcccccctataatgaaaaaatcattcaaacttataaactgagatatatagctatataataaagccattagaacacttatcactattgctactccaccaccacgtggtgtgggcttcacatgtgaacttctaaagttaggtaaatcaataatattttttcttaaagcatattttcgaacactaaaagttaatacaaaagaaataagaaaaagaatgatgaaagatataataacattcatatcaaacctattactttttgaacatcaattttaagctctcatcaaagctaaaaggagctctccatcctaatagttctatattctttgaggtgtcaacgatcaatacagaacaaagtcttgaagcgacagcactcttattaagaagtttagctaaaaaattaattaatactttaggtataggtacagcaataagatttctaccctgaattttagctaacctcgtaaataattctttaactgttatatcgtcttgatcactaattaaaaaaacctgattttttgctaaaggatgtgataaacaaatattaatgaaatcgcttaaattataaatactgaccatgcttcttttattatcgaggcatccaacaggtaaaggaattcctttagccgccagattgatcatactattaaaatttgccttaacatttggcccatagattaaagctgggcgaataataactacctccatcatcgagttttgcgctaaatttaatagagattgttcagcttcatattttgataatccataaggatctttaatatttataatattgtcatgaggagtaaaaggtacttgatcactcacttcaccatttactttaatactactcataaatataaatcgttttacaccagctttagctgcttttttagctaaattcagtgttccttctacatttacttttctataaatagataatggatcactttcagcttccttcataatatgagcacgtccagcacaatgcacaatgacatctactgagctcaagtccaaagaagttagatcatcatttatatcaaaagttatagtctttatgttattacataacttttgtgtatttttacgagtttgagccagaacactatgttctggcattgccgtaaaatattcacataagtatgaaccaacaaaaccactacttcctgtaatcaagatattcattttaaaaaattaaattcttaagtaaattttctaataatatttagaattttactcattgctactttttctgaataaaattcatttaatacttctcttgatgaattgaatgcatagcagtgttttgctaacacaatttcatcaagttgttttgccaaagcctcttcattattaggtgggactacccaaccgatatgatgagtattaatcatatctgctacttctgactcactatccataattgctagcaaaggcttatctgccgccatagaaaaataagatttactaggaacccctaaacctaacatcccatcagccaaagtaatcaatgcaacatcacacgcatttaaaccagttgttttttctttctgatctaaagatccataataaagaatattttgagatcccaaagactgtatttgctctttaagacgagcaacatatgcaccatcaccaataaaaatgaattttgccaaatgtgcatatttcattttctgaatagcatgcagaatattttctacgccttgtacacgaccaatattaccgaagaattgaaaaatcgtagtttcactatccaaccagttcaattcttgtaaaattcggttattagttttgggctctgtaccaatatcagatgagtcaatccaattctgcactacagtaatattgttactttgatgcgttttttgatgtactaactctttcatatctttgccaatgacaatgacctcatcagcacttgcataaatcctatcaaataaactttttaagattttaaataaaaaatgatctttttttaaaattttagccgctgctaaattttcgggaaatacatcatggactaataatatccatttaaaatttagaaattttttaataataaataaaacgaaaagcagtaaaataggtgtcgtacctgtaaaaacgatactatcctttttcactactttcaaagtcttcattaaaaaactaaaagcgataattagttcatataaaaatcttttaaacaaacttgccttatttggctttttagctttaataaagtgtgcatttgcatgttgaggacaattcatgtcctcttttgcaataagaacaaggtctatatcactttgtacattcaacgtgtcatacaattttcctaacaagtaacctgtcgtattttgatatggatgataatattccgtgattaaatagaccttcttcttcactgctttaacctcaatacttcttccaaatcactcgatttacataatctgtgtaactcataatgatacgcacaactttttcactcacatttggcatactgtagtcttcaactaaacgcaaaagacgattttcgcctctagtttgaccttctaaaattgccaaaccttgtaaaatgcgttccgctttcaaccctaccatcattacagccgcttcttccattccttcgggacgctcatgtgcttgacgtaaattaagtgcagggaaatttaagattgatgattcttcgttaattgttccactatcagacaacgcagcctttgcagaaagctgtaacttgttatagtcgctaaaacctaaaggttttaacaattgaattaaaggatgaaactcaacatttaactcttcaatacgcttacgtgtacgaggatgtgtcgatacaatcacaggatatttatatttatctgcaactgcatttaacatttctaccaaatctaaaaaattctgatctgagttaatgttttcttcacggtgagcactcacaataaaatattcatgctcttttaaatttaagcgttcaagtacatcagaagcttcgattttcgctttataatgatgaagcacttcgaacattgggctacctgttttgattactaaatcagcaggcaatccttctgctaataaataatcgcgagcaatcgtactgtaggttaaattaatatcagccgtatgatcgacaattcgacggttaatttcttcagggactcgcatatcaaaacaacgattaccagcttccatatggaaagtcggaattttacgacgttttgctggtagcactgccatacagctgttagtgtcacccaaaacaagtagagcctcgggttgcacttcttctaaaattttatcaactgcaataattacattaccgattgtttctgcgcctgtcgcaccagctgcatttaagaaatggtcaggtttacggatacccaaatcagtaaagaaaatttcattcaattcatagtcatagttttgtccagtatgaacaagaatatgatcaaaatattcatcacatgcagccattacacgagataaacgaataatttctggacgtgtgcccaccactgtcattaattttaactttttcacaaatctctactcttaatttgttattggcatcgcataagtatctggcttattacgatcaaaaatttcattcgcccacagcattactaccatctcttcatcaccgatgttagtaatatcatgtgtccagcccggtactgtctctacaattcgtggttcatcaccatgcgtttcaagctcataaaattcacctgttacaatatgtttaaacttaaatagtgccttacctttaataacaaggaacttttcagtttttgtatgatgataatgaccaccacgagtaattcccggatgagcagtaaagtaagaaaattgcccagcatcgggtgtcttcaacatttcaacaaatacaccacgagcatcaccatatttgggaacactgtaatcgaattgttcaggctttaaaaaactcaaataagttgagtaaagtgctcgagttagccctgttcccacccgatctgtaataagtgtgtctctagatgctttaaatccatttaaaacttttgctaaatcacctacggtaatttgatattcaggttcaacttggaaaaattgttcaacttgttgcccattcagaatattccagaatgtttcaactacatcgtcgacatacacaagacgaatcacagcattttcatcatgaatttgtaagggtaagtcatttgcaacgttatggcagaaagttgcaacagcagagttataattagggcgtgaccatttaccaaaaacgttggctaaacggcaaatataaactgggttaccttgtgcttgatgaagagtgaccagtgcctgctctccacctagcttacttttaccataaggattatcacgctcgacctgaatagacgacgataaaataacaggcgttttcttattagcttgctgcaaaatttgactgatcttttccgttaaagtggtattacctttagcaaattcttcttcatttagagggcgattcacacctgctaaatgtacaatccaatcagcagctaaaactacttgctcaaactcttgatctgttgtttcacgatgagcttttaaaatctcaacttcaggtttttctgataaaaactgaataaagttttttgcaataaaaccattagaaccggtaactaaaactttcatgcttacgcctctggtgaaatatattcgcctcttgttaatgcgcgaacaaaatcaagtttaagcaataattgtttcataccctctacatctaaacgagtagtattatgcgaattgtaatcttcgaactcagtaatttttaagtcaccatcttctacgtacttttcatagttcaagtcacgctgatctgctggtacgcggaaataatcaccttggtcaaaagcatgtaccatttcttcacggcttaataaagcttcgaaagctttttcaccatgacgggtacccataatagaaataggatgatcttcaacatttagtaattgtttcaatgcttcagccaataccgcaattgtagctgcaggagctttttgtacaaagatatctccattttcaccatgttcaaaagcatatagaactaaatctaccgcatcttctaaagtcatcatgaaacgagtcatgttcggatctgtaatcgtaagaggtttaccctgacgaatttgatcaacgaataaaggaatgactgaaccacgtgatgccatcacattaccataacgagtgccacaaataaccgtatctaaaccctcaaggttacgtgactttgcaaccataactttttccatcatggctttagaaatacccattgcattaattgggtaaactgctttatcagtacttaaacacactacacgtttaacatggttttgaatagctgcttcaagtacattttcggtacccaatacgttagtctttacagcttccattgggtgaaactcacaagatggtacctgttttaaagctgctgcatggtaaatatagtcaacaccacgggtagcatttaaaatactgttatagtcgcgtacatcacctatataaaattttagcttcgctgaatgatatttcttacgcatatcatcttgctttttttcatcgcgactaaagatacggatttctttaatatctgtttctaaaaagcgttttaaaacagcattaccaaatgatcctgtaccaccagtgattaataaaactttatctttaaacatacttgtcctctcccataattttagaaaattctttgctaatagtatttgctgcatcattccaactctgaggcaacattttagcctctcgatatccttgctggatcaactgctcatataaactcggattattgtataaggtaattattgcatctttccatgcttgtggtgactcatgatcaaccacataataagcagcctctttacataaatctttagcatatgcaagattggaggtaatctgtggaattccccaaaacattgcttcaatatgagatgagctcaatgattcaattagacttggcataaccgcaattttcgaagacttatataaagattctagttctttgggctgaacccaacctagacaaattaaaattcctttacgatgtagctcggttgtcaagtcaaaatcgatatttaaacattgctcatatgttagagtaacaattaattttaaattaggtatttcattattgaataaatttaaagcttttaataataataaatgtcttttgtagggatagtcagttgcgacataaataatattaaaatcatctggatttatttttttacaaccaatatttttatcattagataaattattactaatacctactgatttttttgcaacgacagttttagtattatgaaaattctttttaactaatttttccataaatggtgtttgtaatatagttaaattagtatatcgcatactaagtctaaaaaagaatcttaaaagactaactctaaatgagccactaggatgtatttctaataaattagcgtcacaaacttggaaagcattatttaaagataatacatgatatgccgaagttttaacatatggtccaacattcattgaccaaataatatcagcagaatatttctctactatttttttaatttaaaggtaaaaaatattaatctaccaatttcacttggcaaattactctcaactatatattcataagtgagattattataaggggtttcaatttcactaagcacagatgttttattacaaacgattacaaaattccaattaggattttgtaatattattgcttccaacatatgcttaatattaattaaagctccacctgaacctttataatattgaaatactatattcattttcactttaatcttctaaaaaactctaataactgattactatagactttattactaagttttaactcaattgtttcttggcattgctgttgcatatatttatattgattgttttttaaaacatcacctagaaattttgcaacttcattaatatcgttaacaatacatgcattttctccatgttgagcatacaaagtaatatcaccaataggattacagattactggggttgccatagaccaactttccactaacttagtaggaaaaccagcgtgggcataacgtttatcatctctaaacaatacagaaaaatgagatttactatatagatcaattacatcacttctcgacagccgaccatgacattttatatatgattgaattctatcaaagttttcacttcctagaagatcttttaattgagagaatgttacgccagctatattaaataaaattggacaatttaattgttgatgtaatgttggaagatagttaataaaatcaataatattatccttttttccaagattaccagcatatataaagttaataccctgctctatcgatggcttttcagcagccaaatggcaatctaatacaattggtaaaaccatttgatttatattaggccgatgacttttcttggaataataattatttaaataatgactaattgaaataatattaggaattttaggatatacataatgcatgcgtataaaattttcaattgccggaagaccaaatctacccattggtaaatgactactatcataccattctgtagaatctaaaattaatttgatattatactttttacacaaagatatcagtttcaatgtaaataaagcgggcggattatagactactataatttcaatagtatccttcttaaaataattttcaatccaatttaatgttctctcacctttatatataaaagatccaaatttttccaatagagtagttgaattattatctaattcagcttgtggaaaacatttaatagagttatgcaaataaaattgattatctattaaagatttatttttttgctcccacccacaaaccaatatttcatcataatagggcttaagaatattaatcatattattaagccttaaagaagctgcatccccatcaggaaatcgaaatgctccagtaaataaaattttagccatgatttgttcctttatagaacttctaagattgagagaaaaatataaaatattctactaaatataccctgaaccaaaattaataatattaattaaaaattcaatagatttcatagaaaaatataataggattaaaatcaataaaggatcaagtggttttttataataaacaaacgcaccgataaaaacgaaaaaagcaaagatagccactcgttctacatccaatacaaatgaagcagctattaaaggaataccacataatagaactttaaaatttttactatataaataacttaaaataataaagaaaattgtttttataatactccctaaagaccccccttctccactatatgcttcaactttatgagaaatatgctcactaagaaaaaagagaaaaattccacctacaccgagcatcgaaataataatagcaattttcaaccataatttttttaattttcttacttcaattaaaaatacataaaatgaaaagaagaaagattgtatatgaccaaccatagctaaaaaataatataaaaccttatattttgaagtagcaagtaaatataagagtacaaatattacaccaaatttaagtctttcagcagcaaataacaaaactatagaataataattagttaacaataagatgcttaaaatatttctagtaaagcttactttataatatttaaaaatatttgcacataaaagataggcaaacacagcattcgaaaaaataatgaatatatttctatcaactcctaacttattcataacccacacaagcccaaagtataatggctcttgggttcctagtttagagttataacactcaaaagaatcgacactcggataaaaacaattatcataaaaatcaatataaaattgttgatccccatatatatagagaggaacaaaataataagaaataatcaatattaaaaatgcatacaataaagaatacatttttcccttttgcaccttcaccatataaacacctgatttaaaaataacatatttcaaatttcatccaaaattcatttaataatattttgatttttcatttcttttaaaacaaaaaataaaatacctaaaattaataaaagactataaataaaatatataacagtataacttttaagaatttcaaacacgtcagatatgcctattttctctcgaaaataaagaattattgccacgattgctataaaaaaaatatccattattaattgatatttttgtagatgtttatatcttattacaactctaacatatatagttcccataaatacaaaagctaaagttataatataaaatccgaaatcagacactaaattccatgtgggagtttttattaacaaattaattatataatgaccacaccaacctaaaaaaggagcaatagctattatgaaaccacctaatgccgttgcttttaaagttaatgactttacttctaaattattaattttagtaatatgaaaatataaagcgttagtacaagatgtagatattaaaattataggaggccaaacaaggcgggatataaaactatattgccctatataattattattcccattaaagatataagaaaatataactataggcccataaaaaataaatactgacgttagctctaatattgaaccgtataagctatatggtctatatttcgtaaatatattttttatgggaactttaaataaagagcgtaaactaaaacttggtaaatcaatactttttttaataaaataatgtaataacccactatatattacttcacctagcaataaaccataaattaatccatttatagcagtactaaaagacaaggccgcttgagatataactattacaagagctcggatcacataactagttgataacctagtgaaattccctgagtaaacaattaaactacgtaatgtattagttacagcagtgatacttgctaaaaaaattgctaaaattgaaaaataatcaatattaaatagaccatatagtattaacaaaaaagttgtaacagcaaaaatacacttaaagtttaaaactattaaatcatttaataaaaattgatttttttcaaaaggaattgctacatatagttgaaggctaataaaaactgtaagggctgtactataagcctgtatcgtaccaaaaacaccaaattgttcaggtgtatatagaaaagcagaaagtggaaggaacgcaaattgtattaattgtgcagctccattcccgagcagaattttttttatattattaaataacgacacaagttatttaccagatccaactttattgaactctgctacataccatgatacagcttcctttaaaccatctcttacgctatatcttggttggtaatgtaatatttctttagctttagtaatgtcagctaaggagtgacgaacatctcccgttctaaaatctctataatgcggctgagttttctcaagtttagccagtgttcttaaattatcagaaatttcttgatagagttgatttaaactaatcctttcaccgaaagcgatattataaacagctgactcctgtacatttggagctgtggcagccaaaatatttgcttgcacagcattttgaatatagcaaaaatccctactcgtctcaccatcaccattaataaagacttgttctttttgcaaaagtagagatgtccatgtaggaattactgctgcataagcaccctttggattttgtctttttccaaatacattaaaatatctcaaccctatactgtgaaaattatatgtttttgagaatacgttagcatataactcattaacatatttcgtaattgcatagggagataaaggctgcccaatgttttcttcaacttttggtaaagcagggtggtcaccataagttgaactactagcagcatatgtaaaactttttacttgagcatctctagcagcaactaacatgtttaaaaacccagtaatgtttgcactatttgtcattataggatcagcaatagaacgcggtactgagcctaaagctgcttgatgcagtacataatccacacctgtacaaactttttggcaatcttctaaatttcggatatcacctttaaaaaaagtaaagttttcccactgctcttccgagactaaactctgcacgtcatttaagttatgttgaaatccagttgcaaaattgtctaatcctatgactttttgattcaactttaataaagtttctaataaattagaaccgataaaacctgcaacaccagttattaaccatattttaggattactcttaagctgttccaatacttgctcatattgattcatattacttctcaacaaatattattttatagacggatatctgactcagattgatctaagacatatttcaaatcataaagaacatgagatgctttacctaaagagcgaattgcctctatacccatttctttaaactcattatgagcaactgctaatattacagcatcatattgacccgctttaggttgcttaactggagtaataccatattcgtgttgagtttcttcactatcaatccaaggatcatatacatcaacatccatatgatattcttctaattcttttacgatatcaatcactttagtattgcggatgtcagggcaattttctttaaagcttaggcctaatactagaactttagaaccctcaacttggattttcttttttatcattccttttacaagttgagtaacaacataagctcccattgaatcattcaatcggcgccctgctaaaataatttctggatgatatccaattgcttgcgctttatgagttaaatagtatggatcaactccgatacaatgcccaccgacaagacctggacggaatggtaagaagttccattttgtaccagcagctttaagcacctgttccgtatcaataccaagtttgttaaaaataagtgctaattcattaattaaggcaatattgacatcacgctgggtgttttcaatgacctttgccgcttcagcaacttttatactaggcgctttatgagtacctgctttaataattaaattataaacctcatcaatataatcagccacctcaggtgtggaacctgatgtaattttcaaaatattagtaacacggtgaagcttatcaccagggtttatgcgctctggactataacctgcaaaaaagtcttggttgaattttaaaccagatactttttctaaaacaggaatacatacctcttctgttgcacctgggtacacagtagattcataaacaacaatatctcctttttttaatacttgtccaatgctcgtagaagctttaattaatggagttaaatcaggctgtttaaaatcatctattggtgttggaactgttacaatataaaaattacaatcttttaattcttccaaatttgcagtatagctcaagtaagacgcttgttttaattcttctggtgtaacttccaaagtatgatcttgaccacttttcaattcatctatgcgtttttgatagatatcaaaaccaacaaccggtacttttttcccaaactcaactgccaatggcaagcctacataccctaaaccaataattgctattcttaactcggcaagttgcataaaaattagccttattccttacaaattgtatatttaaataatgatacatgttgactggagatcgtcgagcgtaactatagcagtttttttttattctccgtaatgcaattgtataaaagtgtttacagcatttactaataagacggtttaatttttttgaaatgtttttcatatttattgttaaactttttcaacggaaaaatagccgttcggataaactaaacatacaaagcactacgatttttcgatgttttttgatttcttttcagctagaatctgtgcatcctgcgtttaatagacacttgttaatacgcagtagaaaatatcaattaaagataaatacacaaagggtcgcgtgtgaagtattgccagtttttctctgttcttgctttaagcttaagtgctgccagctgtgcggttacttccggtttacaaacttatgatattcctagtgagggtgtttataaaacggacctcggaactacagttaatgtagttaaaatttctcaagaaacattatcggcaattcagcctgctcaaattgactatcaacgcgactacgcatcattatttaaaacgcagcagtctatttatcgtttaagccctggcgatattctttctattcagctttgggcatatccagaaattactcctccagttaatggtattagcagcgaacaatctattcaagccaatggctacccaatcgatcagagtggttatattcagtttccgttggttggacgctacaaagctgctggtaaaacacttgctcaagtcaaccgtgagttacacaaccaactcgctcgctttttaaaaaatcctgatgttattgttcgcgtgctttcatatgaagggcagcgcttctctgttcaaggtagtgttaccaaaggtggccaattttacctaagcgatcaaccggtgagtatttatactgcattaggtatggcaggtggcgtcactacaacaggtgataacacttatattcaactgattcggaatggccgaacttataacctaaatacgattgatttagagaaagcaggctattcactacacaaacttctggttcagccgaacgataccatttatgtcagtactcgtgagaaccaaaaaatttatgtgatgggtgagtcaggtaaaaaccaagctttaccaatgcgtgatcaaggcatgactttgactgatgctctaggcgaaagtttaggaataaatcctttatctggaagttctagccgtatctatgtagtacggactaacccaaatgatcgtacaaccgaaatttatcatttaaatttaatgagtattggtgattttggtttagcgaatcaatttaggttacgcagtaatgatattgtatacattgacgcgactggattaactcgttggcaacgtgtggttaatcagattatcccgttctcaaatgctttatataacatagaccgtttgggacaataattttatgcaaattaaaaatattttggtggtttgtattgggaatatttgccgtagccctatggcagaatatttattaaaacagcaatatcctcaactcaatattgaatctgcgggtatttcggggttgattgggcatcaagccaatgaaaaggcccagctctgtatgcagcgtttaggcattgatatgcagcctcatattgcgagaaagctcaatgccgagctcatcaaaaaagctgatcttattctagtgatgagcagtaaccaacaaaaacatattgaacaaacttggccctttgcaaaaggaaaaactttccgtttaggtcattggcaaaataaaaatgtgccagatccctaccaacatgagcaagctgtatttgatgaaacttgccaactcattcagcaatgcgtggctgactggaaaccttatatttaacgtatagatttttaagcatatgaaccaacagaatactaataccgaagatacaattgacttaaaagaattgtttttttcactgattgctcagtggaaactcattgctctatgcgttattttaagcgttgtatgtgccctactctatttacgtgtaacgccagatacctattcggtagatgctttagttcaggttgaggacagtaaaggggcttctgctgcacttttaggtgatctatcacaaatgattgagcaaaaatcaccagctcaagcagaaatagaaattttaaaatctcgtttggttttaggcacggtcattaaggacttacatctaaatatacaggtctctagcactgaaaatacacttacccatcgcttattaagtgataccgactataaaactgaatacactaaaaaatcggttttatttaaagatgacttaaaaagttttgcagtacgtgaatttgaagttccagcttactatgttgacagaaacttacttcttaattttgataaacagtctttacgtttaaccgatcctgcaactgaagaagtcatcttaactgttccattaaaccaagctaatcacgttgctggtcctcatggtttatggaaagttgctatctttacgaaagatcaatttgatgcgacctataatattaaaagtcaatcaataccagctgctgtaaatgcacttagcgcaaattattcagtagcagaacgcggcaaacttacaggagtgttaggtcttaactatcaaggtcaagataaagaacaaatcactaaagttttaaatgccattttagctacctatagtgcccaaaatattgagcgccgttcggcagaatctgctcaaaccttaaaatttttagatgaacaactacccgacctgaaaaaacagctagatgatgcagagcgtcaatttaataaattccgtcaacagtataatactgttgatgtcactaaagaatctgagctttatttaacccaaagtattactttggaaactaaaaaagcagagcttgagcagaaacaagctgaaatggcagctaaatatacggctgagcatcctgcaatgcgtgaaattaatggccagctcgctgcgattaataagcaaattggtgagctcaatagtactttaaaacaattaccagatgttcaacgccaatatttacagctttatcgtgaagttgaagttaaaacacaactctatacagcccttttaaactcataccaacaacttcgtattgccaaagctggtgaaattggtaatgtacgtattgttgacactgcagttgagccagttgaaccaattaaaccgaaaaagttgttagtccttattttatcggtatttgtgggtggctttattggagctctaatagccttattacgtaatatgttacgtacaggtattaaagactctggtcaaattgaaaatgaaatggatttaccggtttatgcaaccattcctcgttccccaatccaagaaagccgcatcaagattttaaagaagaagaagagtattcctattcttgcggttaaaaatagtgatgatatagccattgagagcttacgtagtatccgtacagctatccactttgcattagcaaatgcaaaaaataatatcattatgattgcaggtccttctcctgaagtaggtaaatcctttatttcaactaacttggcgactatttttgcacagggcaataaacgagtactattaattgatgccgatatgcgccgtggttatatgcataaatatttcgatgttgatgtaaaaccgggtctatcagaacttttaagtggacaagctgatttacaaaatgtattgcacaaaactcaggtaacgaatctagatgtgatcactcgtggtaaaagcccaacaaatccttcagagattttaagctcaaaccagtttaaggaattacttgagcagctacaaagccaatacgaccacatcattattgatactccaccagtgcttgcggtaaccgatggtattattatttcgcaatatactggtgtgaacttaattgttgcacgctacgccaagtcacaaatgaaagagcttgaactaactgttaatcgttttgaacaggcgggtgttaaagtcaacggttttattctcaatgatattcaacgtgctagcgctggctatggttatggctataactatgcttatgcctataaggcacaaaaagaagactaattaaaactcttcataaaaaccggatcaaatgatccggtttttttatttgctttttaagttttgccacattaaaactaactaaaatatataaaaaaccactcgtttttttgttaaacattctatgcttaagtcgaagcatgctaagatcgaagcagccttttagactcaaatgattatttttggaaccctttatgagtaaagccttacccattgctgtcgctgtagttttaggcggtgctgcacttgtacctgtatattatgcaactcaacatccgaccacagaagtcggacgtaaagcagacaaaaatgcttctccaattcaaaaaatcagttacgttcttgggtatgaagttgctcagcaaactcctcctgaactagatacgaaagcatttgttcaagggatccatgatgcgcgtaataagcagcctagtgcttatactcaagaagatttaaaagctgccgttgctgcttatgaaaaagagttacaacaaaaaatgcagcatcaagacaaacctgagcaagcaggtacggctgttgactctgcagatacacagttccttgcagaaaacaaaacgaaagcaggtgtaaaaaccactgcatcaggtttgcaatatatcattactaaagaaggtactggtaaacagccaactgctcagtctgttgtcaaagtacattatgaaggtcgcttaattaatggacaggttttcgatagttcttataagcgtggtcaaccagtagaattcccgcttaaccaggtcattccgggttggactgaaggtcttcaactcatgaaagaaggtggaaaagcaactttcttcataccatcaaatcttgcatatggcccacaagagcttcctggaattccagcaaacagtacactgatttttgatgtagaactcatttcagtgaaataataacaatccaggagagtcgttatactctcctgtttttttggaaaatgacatgaaaaaaatcagtttggttattgcagcgtcaacaatgagtttatctgtttttgctgctgcaccgataacaaataaaagtccggcaaaagatcagtttagttatagttatggttatttaatgggccgtaataatactgatgcgttaacagatttaaatcttgatattttttaccaaggtttacaagaaggtgctcaaaataagacagcacgcctaactgatgaagaaatggcgaaagcaattaatgattataaaaaaacattagaagctaaacagctagtcgaatttcaaaaacaaggtcaacaaaacgctcaggctggtgcagcttttctggcagaaaatgctaaaaaatctggtgtgattacgactaaatcaggtctgcaatatcaggtattaaaagaaggctctggtaaaacacctaaagccacctctcgtgtaaaagtaaactatgaaggacgtttactcgacggaactgtatttgatagctcaattgcacgtaatcaccctgttgatttccagttaaatcaagtgatcgccggatggactgaaggcttacaaactatgaaagaaggcggtaaaacccgtttcttcattccagcaaaacttgcttatggtgaagttggcgctggggatagtatcggtccaaatagtactttaatttttgatattgagttgctacaagttttgccaaaataatttttgaagataaaaaaagcgatctaaattgatcgcttttttattttagtgttttaaatctctcggtctgaagcctgtcagtaataagccaattaagtaagcgatcacacctacaacgcataaacctactacctctgcaacacgaatccattgagagagttcaccgttataccaatttaacccgaaccaaagcgctgcaatcatcgcaagattagccaagccatattgaagtgccagttttttccaatgtgcaccaaatcggaaaatattacgcttatgtaggtagaaatagagcaaacctgcatttactaaagctgaaccagaagaggctaatgcaagcgccatatgctctgcatgccaattgattaatttaaagaatccaatgaatacaacgtttaaaatcgcattggcagcaaccgacattaaacccacacggaccggtgtttttgtatcttgctgcgcatagaaacctggtgcaaatactttaattaacataaaggaaattacgcctgcactcatacattgcaatgcaagtgctgtcatttgtgtatcgcgtaaatcaaactcaccacgttggaacaatgcctgaataatcggtgtagaaagcataaataaagcaatacttgctggcaaaccaaccaacacaatcacttttgctgcccaatcgatcatactgcgaaacttcgcttggtcttgttcagcatgacgtgctgacagtgaaggcaaaatcactgtaccaatcgcaacaccgattaaacctaaaggtaactcggtcatacgttcggcactgtagagccaagacactgaaccatcttgcatgaaagatgcccaaatcgtatttagcaataggttaatctgagtcacagatacaccaaataatgctggaagcattaattttaaaatacgttctacaccttcatgtttaaaatcaacttttggtgggatcagtaagtttttacgccataactcaggaatttgtatcgctaactgtaaaataccagccgcaacaactgaccaacctaaagctttgattggctcagccatatacggtgtaagccaccaagcccctgcaatcattgctacgttcagtaaaacaggtgaaaaagctggcgaggcaaacgagccataactgtttaagatgctactggcaaaagccgtaagcgacataaacattaaatagggaatggtcagacggaacatactgaccgctaaatcaaacttttcagggtcattatggaagcccggcgcatacatatagataattgctggagctaaaaccatagccacgaaagtcagtaaagtcatgactgtcagcaaacagccaaatactcgactaattaagatctgcacttctgcatgcgcacgacctgttttatattcggtcaataccggaataaaagcctgtgaaaaagccccttcggcaaacaaccgtcgaaagaagttgggaatacgaaaagccacaacgaaggtatcaaaatctttacccgcaccaaacacgttgagcaatacgacatctcgtactaagcccaatacccgtgacaacatcgtcatcgcactgacaataaaagtcgatcgccataatgccatcgtactcacctacagctatattcgaaagtcgctattgtaatgaaactagaaaatcttttcgttgtgaaatgatgaatgaactcaagtttttttctgtgctaacaactgcctaaagtgctgccatttaaaataaggtcccggatcggtttttcggcccggtgcaatgtctgaatgccctgcaatatggcttttaatttcaggataggcctgtcggatagcagtaactacatcggttagtacggtgtactgtacttcttcgaaaggcaggtcatcacttccttcaagctcaataccaattgaataatcattgcattcaactttggctaagtagcttgaacgccctgcatgccaagcacgatcattaaagttaacaaactgtaggacttcacctgttcgtaaaattaacaggtgtgtagagacttgcataccttcaatagtctgaaaatagggatgaacggaccaatctaatttattctggaaaaactgttcaatatagcctcccccaaactgagaaggcggcaagctaatattatgaaccacaatcatttgtatttcggtaccagcgggacgctggttaaaatttggagaaggtacttgtctcgccccttttaattgtccatctataacttcatacggtgtgatttgcttcattgagatgccaataaattgcttgccaattgttttagtttaaaacagttaattgcttttcagagtagtcagcatgattgtttatcgcgattaatctgataaaacagcttatttttaaagtcgacggtgctaatatatcgcaagttttagggtcatcgacaaaatggaaaccgtatgagcatacctcagtctttgcttgaacagtcaattcaaatcaatattcaacaagcattacaagaagatattggggacggtgacattaccgccatgctcacacctgaagatgaacaggctaccgcaactattattagccgtgaagatatggttttagctggacagccttgggtgaatgcgctcatctcagcttatgacaatactgtacaggtgacttggttaaaacaagaaggtgaccgtgttgctgcaaatgaagcctttttaaagcttgctggttctgcacgtagtttactgactgtagagcgtcctgctttaaactttattcaaacattatcagctgtggctacaaaaactgctgaatatgttcagcatcttgaaggtttaaacacaaaacttctcgatacacgtaaaactttaccgggcttacgtattgcacaaaaatacgccgtaaccgtcggcggcggacaaaatcaccgcctcggtttatttgatgcattcttaattaaagaaaatcatattatggcagcgggcggtattgcaaaagcgattgcaaaagcacatcaaattgcgccaggtaaacctgttgaagtcgaagttgaaacttgggatgagctaaaccaagcgcttgaagcaggtgcggacattgtcatgctcgacaactttagccaacaacaaatgattgatgctgtaaaacacgtggcgggtcgctgtaaactcgaagcttcgggcaatatcactattgaaaacttacgcgaagtagcgactactggtgtcgactatatttctatgggcgtgttgactaaagatgtcaaagccgttgatttatcaatgcgttttaatgcctaaataaaatcagcatcattattggtatttttttgcgacttggtcatgtctgccgcttgtgttttttgccatgctgactgagtcgcttgtgccccactatcccgtggatcggcagccattaaaacaaaagtaactactgctaataatacaataaaaccttgtagcataaattttccccatcactttaaaaaattagggtttcaaggtaaaagataaatatgactaggcttaggagattctgttacaaaaggtaagcctttatttttattattcatctatacgacaagttattacttgtcttcatttatatttcccaacattagattgtgcgagatgtcatctacaacctgagcaagacaaagcgattatagctttgtcgaagcgcaagaatgttattaagccaactgttgtctttcgatacgtaataaagattaattaatctttattacgtactttactttgggcgaaaccaaagtaacgaattagctacttccactggatgaataaacgataagactccgtcatgctaactaatttaaaataattattaactaagacttcagcttaatattcatgcattacagcaacttaagactctaaatatcccatatatggatcagaaattgaatcttcttgagtttctatacgtcctgcaaaacggcgactaaacgtcgcatcatccgctaatgtcaccgtaaaatcataccaaccaccaaattcagacatatcccaaatcagttctttttcagaactattagtttctatcatccatgtcttgtttggtagataagcattagctttgacgttgagcttgactgacttattaccatcatgacgcacttttaaatataaattcgcatcacattcttctacacatactctaatttccggtaatgcttgagtctgattagcttgacttaaattacctttaaacgcacggtgaaaaccatttggtccaagtacccataaatcatactgtccattgatagtattccacacgtcatcaagctgtttgcccgcctcaaccatataacggcgtggaattgccgtaagatctaatcggttatagacatggaaaacggctgcctgtttacccgtattggagaacatcagcttaaccgttttttgagtggcatcgactttggcactagtgtgcaaaatataaggtaaagcacgcgaaggtcgaattcctatttcctgctgaggaaattgttgctggctcggaacagaaacttgcggcaatagttcttgagcgacacgaatcgcatcggcttcggcttttgttttcttcccatctagttcagcaacaggcaaaagattcggtgttttaaaattaaatgccgttgttaaatcaccacatacagcacggcggtatgggctaatgttaggttcttgcacaccaaaacgtttttctaagaattgtaaaatagaagtatgatcaaagacttgagaatttacccatcctccacggctccacggcgaaatcacatacattggaacgcgtacacctgggccatacacccgtccgtctgtttcgggttgagattttgaagtcgctactgctggatggttaaagtattcataagatacttgttggtccgttaaagtggtttttccatatacaacaccgtttatatctttagaaggtgcgcttggtgaaggaacatggtcaaagaaaccgtcattttcatcgaagttcaccaataaaacggtttggctccacacttgagagttttcagttaatgcatttaatacttcctgaatataccaagcgccttgtacaggactagatggccctggatgttcactgtaagttgcaggagcaactaaccaactcacttgcggtaatttaccttgcgcaatatcagctttaaaagttcctagaaaaccaccgtctggcatggtattggcaatacctttgtaaagtggttgagtcacatcaatcttttcatcatatgctggacacattagtgtgtcgttactgacaggttgcccagattgctcatttgcacggcgatattgcttgaaaccagctaaagggttatcagtaaagttatccggcatgttttgataaactttccatgtcacgccagcctgctgtaaacgctcaggatatgtcgtccattcataaccttctgttgatggaccaattccatcaaattcgttgaccacactcgcaacacctgcgcctgtaggtccattggttcccgtccagataaatttacggttcgggttagttcccgcgtgcatggcacagtggtaggcatcacaaatcgtaaaagcattcgctaaggcaaattgatattcaacttcttgttttttgtagtagcccatcgactgcggttgtttatgcgctacccaatcactcatacgcccattatcccaagcaccttgaccatctgaccatgaatgatttgtaccagtaacacgctgagcatttcctaaacgactatctaagtggtatggcaatactttctttttgttggcgtcatattgttcccaaacctttcggcgttctgtcataggaatggtaaaacggtcaccgaagccacgtacaccttttagtgttccaaaataattatcaaatgaacggttttcctgagtcaaaatcacaatgtgtttaacatcttgaattgttccactttcaactttggcgtcaattgctaacgctttttgaatactcagcgggaaactcgctagagcagctgtcccaaacattgtttttgtagaatttaaaagaaattcgcgacgattcattagttctatcctgagttcttattatggtgcacagtgcattttgcaattactggtaggcggtgttgttggcgatgaattatctgagtcgttatcatcgttacaagcactgagcatgagtgctaaagatgtaattaataaaattgaaagttttcgcattggtttttcccaaacggtttaaatgcgaactactaataaagcgaaaaggtgacaggcaagtgatgtttttatgtcgatttgatgaaggcataaaaaacgcatccgaagatgcgttttttagaaaactaaaacttaccagcctaaagcttcttgttgctttttaatgagctcggcaattcctttttcagccatttctaacatggcattgctctgagcacgggtaaacggtttatcttcagctgtcccttgaatttcaataaactcacctgcttgtgtcatcacgacatttaagtcagtttgacagttcgagtcttcttcatagcacagatcaagcaatacttcatcttgatacatacctacggaaattgcagcaactaagcctttaagtggatcttgcttaatttttttctgtgcaagtaaaacattcatcgcatcaaccaatgctacagcagcaccagtgattgaagcagtacgtgtaccaccatcagcctgaattacatcgcagtcgatcgtaatcgtgttttcaccaagctttttcaaatcaaccatcgcacgtaagctacggccaatcagacgttggatttcttgagtacgaccagtttgtttgccacgagcagcttcacgatcacaacgtgagtgtgttgagcgcggtaacatgccatattctgctgttacccagccttgaccttggccttttaaaaagcgtggcactgagttatcaatgcttgcagtacaaaggactttggtgtgaccaaattcgaccagcacagaaccttcagcataacgggtgtagtttcgtgtaattttcacttcacgtaattggtctaatgcacgttggtcaatacgcataatccttcctaaattctcttaaatacaaacttgggcatagtatagcaaaggattttgacaggttgagtttattccctactttcaaatgtaagtctgcacttttcatgacttaaaaataaaaatagcccctttttaggagctatttattggtctatctattaggcaaatttgaattttgcttttaatttttctaatgtctgcatcacttttgcagtggtgtggtttggtaatgagcattttgctaaacgcacccatacactccagaactgacgcatgaaattagcttcattgtagttaatgccgtattctgcacagagtgccttaattttcggtgctacttctttatagcggttggcaggcatatctggaaataaatggtgttcgatttgatggcttaaattaccactcataaaatgaagccattctgtaccactaaaattacttgaaccacgaatctgacgtaaataccactctgccttagtttcagtatcggtattatccggctcaaacgtttctgcatcttcagtaaagtgaccattaaaaatcacagcagatgaccacaagttacgaataatattagcaactacattgcctgcaaaaaccggtaaaaacataggaccagagatcacagggaaaaacacataatcctttaaaacttggcgtgttgcttttttacggaccttagccgcatcttcccacacctgtttccagcttttggttttataaactaatgcatcttcaagatgtagattttgtacacctacataccattcaaagaaaaacattaactgtagagccagaggaatattaaataggtgacgaggttcccacttctgttgatcacttactcgcaaaataccatatccgacatcatggtctttaccgacaatattggtataggtgtgatgtacatagttgtgtgtttcacgccagtcatcaccagaggcaatggtatcccaatcataggtattaccattcagacttggttcatttaaccagtcaaactgaccgtgcataacgttatgaccaagttccatgttttctacaattttagaaatacccagtaaacctgtacccaataaccagacaggaggaatccagccaccaaacatcaacatgccacgtgatgcgatttcggtatagcgaacgaagttacgcactttgtagatatattttgcatcttgctcaccaagactttgcataacatcttgacgaatctgttcaacacggcggccaaattcttcaatttgctcaggagttaaatgagcagatttagaaacagtagaaaattctaatgccatattcatagggttaatcctctgtaattctttttatagatcaattgtgactgggcttaatgcctggctcacgcatagtttaattggacggttcggttggtcttcaatttcacctgttaacaggttttgagtaactccgctcactttggtacaactgcatttattacaaacacccatacggcagccatgttgcgggcgtagtcccgcctgctctgcactgctcagtaaatttgtttcagctaaaaattcgtgttgagcacggcggaaaataacaggctgtgctgcatgtgtaccagtcacttgaagtggttggaaatattcttgatgaagctgcgactgggcacctttttgtgcataaatttcattggctttctgcatcatgccatgatgaccacaaacataagttgctgtttgctcgaaatctggaaccagcttttgcagtaagctttcagttaaatgctgcttttgctcggtggtattaaaaaagtgatattgaagctgcgggtgctgttctgccaaagcttttaattcagtatgaaaaatttccgcacgattaaaataaatgacatgaatttgttcaagttgctgttttaaagcttgctgcaagagtgaataaattgcagttataccgcttcctgacgcaatcaaaatcgcaggatgctgaccttggtgcaaaataaaatcaccttgtggttgtgaaatctcaacacactcacccacatgtaatagttgagctgcacgagacaccaagccttgtactttaatacctaaagcgatttcaccttgagtggttacttcaataatcgaatagctacgttgttggtaaacgccatcgataagcaacgtcaatagaatgctttgtcccgcacaaacctgttcgaaattaaaattacgatttggtttaagcttgatcagtaccatatcggtatgaagcggctgaacagcggtaacttctgcaagtacccttttccaagcccaagtcgcgttaattttctgcaaaacaaaatcaacgaaatcttctcgaacccaatgtggttgatagttaagtgttgcgttcatacgttcctcttttgtttctggctatttatttgagtgaacacatgttcatatagtgaacatatgtacactatatttataagtgttcactcagtcaacacttgttcactattttttttatgaaagtttgctcttttttgttagactttggctcacggtttaaataggtttttttaatgtcgatacgggatgaacgaaaacagcaaagtcgtcaggcacttctcgatgcagccttgcatctgagcacgtctgggcgttcgttcagtagtatcagtttgcgtgaagttgcacgtgaagtgggtttagtgccaacagcgttctatcgtcattttcaagacatggatgaactcgggaaagagttggttgaccaagttgccctacatttaaaaagcgttttacatcaactcggccagagttatttacagcacaagtctgcaaaaacccaaaccagtattgagctatttgtgcaggcagtgaatcatagccctaaacagtggcaatttatgattgctgaacgttggggtggttcagaaacggtccgtgcagccattgctagagaaattgaatttttgattgaagatctcacaacagatctgactaaactcgaaaattttaaacatattcaaaatcctcaagacttaaatgtcttatctaccattttgaccaatatgtcatttacatgggcaatgacgtggctcaacctcgccaaacaatatcaaggtgagcaacttaaacagcaacaaactgcatttattgaaaatgcgtctacacaagttcgcttactgtttagaggcattgctaattgggaacggtaaaactggcaaatgacaaaaaacaggttatgtgttaatacgtaaagagtgaaagaaaaaggcgaaaatttcgagaaaagtctttttctttttacaggaagtaaactattcgttaggccaaactggtgtgggaatacctatgaatcttgatcgtcatacacagtttttgatgcgcaaagaaaaaattctaagcgttgcagaaaaattgttactagaaaacaatcaggaaattactctagatgaattagtggccgagctagatattgcaaaaggtacgctttataagcactttagaagtaaaaatgaacttctgcttgaattgattattcaaaatgaaaaacaaattttagaaatttctcaaaaatataatactgattttaaagagtatgcaccacggtacatgctccaccatttgctcacaccgggaaaaacgattttattgcatcaacttgaagaaaatctgacgatgacagagtctaagttgaagcatctttttgaagagctttatgaagttcgtcaacaacgtattctagcgattaaagacattacagaaagttatttaaaatcattaaattatgatatgtcgattcgtgactatttatcttatatctggtcactcacttacggtgcatcgttgcttttaaactcaacttattatcagcgctcgattggttctcgccaaaaattaattaatttatatattaaccaagccttatcactacctacccaaaccaccaattttgatgcgctaaattttcagatagaagacgagaattctcaaaattaattgaattatttcgtgattatgaaataaattttataaaaaagggcttcataagaagccctttttaaagcaataaacttttattttgccttacgttctttttcaattaagtaattaaggacttgggtaactttaccatcttcaccctgtacaacatatttaccattaacgacaactgctggaacacctgttaattggtactgttgagcaagtttatttgactcggcaacttttgcagttacagcaaatgagttgtaagtgctattaaatttttgttcaggcacaccgtaacgagtaaagaatttagccgcagaagcctggtcaaaaatctgctgaccattcacttgaattgcatggaataatggtaaatgcgtgcgcttacgtacacctaatgcctcagatgtatagtaagtacgtgccccttgttcccatactttgttcatggctgctggcgtacgcacaaaacgtacatcactcggaatttgttttaaccacgtttgcatatgtggttcaagtttaaaacagtgcggacagccataccaaaagaactcacgaacttcgattttccccggtacttccactttgcctggattggcgattacggtgtagtctttaccagcaacaaaatctgctgccattgcactacccgatacggccataattgctgcactcaaaccacccaaaaccaattttttcattgttacagcttttcctctaagttgttatgcattagcttatgccctaaatataaaacaaatatgctaaattcgttttgcttctgtgaagttttttattgggtttatcgcttttttcccaataatcgctacactaacggcgaactacatcaaaaagataacccaagtttagaggtgacaccatgtcgcaattgaatgttgatttacaagaaatcgcaaaatttgaagcacttgctgccaaatggtgggatcaacattctgaatttcgcccacttcatcaaatcaatcctttacgtttgaactggattgatgaacgtgcaggtggccttgccggtaaaaaagtacttgatgtcggctgtggcggcggtattttggctgaaagcatggcacgtcgtggagcagatgtactgggcattgatatgggtgaagcacctttagccgtaggtcgtttgcatgctcaacaagaaaatgttcaaaatattgaatatcgtcaaattccagttgaagagttggcgcaagaacaagcaggccaatatgatgtggtcacttgtatggaaatgatggaacatgttccagacccggcatccattgtgaaagcatgtcagactttggttaaaccaggtggccatgtgttcttctcgaccatcaaccgtaacccgaaatcttatttattcgccattattggtgctgaatatgtgctgcgcatgctgccaaaaggtacgcatgattatcacaagtttattcgcccatctgaaatggcacatgacattcgtaatgcaggcttaactttaaaagaaatgacaggcttgcactacaacccaattacgaagcgttattggttagcaccaaatgttgatgttaactatatggttcacacaataaagacaggtgcatgatgaaagctgttttatttgatttagacggcactctcatcgatacggctgccgactttattcgtattattcaacaaatgtgccgtgatgcaagacgccctgttgtagaagccgatcttattcgtacacaagtgtctgaaggtgcccgtgccatggtcaaattggtctacccagagctggatgtgaccaatccaattttcttggcacatcgacaaaattttttagatttgtatggcaataatatagttgtcgatactgacctgtttgaaggaatgtatccacttttagaagagttagaagctcagcgaattccgtggggtattgtcaccaataaaccacgtggtttaagtgaatctcttctagaaaagttaaacctgacagaacgctgtgcggttttggtatgtccggaagatgtttctaaaaccaagccagacccggaacctatgtatttggctgcaaagcagttaaatatcccggcaaatgaaatcatttatgtgggggatcacccacgtgatatcgatgctggccgcaatgctgatatgtataccatcttggcagcttatggctatttacctgtcgaacatcgggatgatttaaacgcttggcaagccgattcgattgtaaatacggtgacagaattacacgagttgttacgtcaaaagcttcctgctctacaggaaaatcagcgtatgataagttaatacaagagttttataagtttttttaacggttacttatatcaatataaaaagaaggaggtttaccaatgaaatattcagaatatcaacctcgtccggatctactcaaagatcgaattattttaatcactggtgctggtgatggaattgggcgagctgcggccctcagttatgctttacatggtgcaactgtagtcttgcatggtagaaccttaaataaacttgaagtaatttatgatgaaattgaaggtttaggcgcacctcaacctgctattttacccctccagctttcgagtgcttccgatcgcgattatgactttttagtaagtacactagaaaaacaatttggtcgtctggatggcattttgcataatgcgggcattttgggtgagcgagtagaacttgcacattatccagcagaagtatgggatgatgtgatggcagtcaatttacgtgcaccttttgctttaacccaagctttattaccgctattacaaaagtcagaaaacgcttctgtcgtatttaccagctcaggtgtaggccgtgaggcacgcgcgctctggggtgcgtattctgtctcgaaagtcgcgattgaagcggtgagcaagatttttgcggctgagcatacttatccaaatattcgctttaactgtattaacccaggggctacacgtactgccatgcgtgctaaagcttatcctgaagaagatccgaaaacattaccaacacctgagtccatcatgccggcttatctttatttaatgggtgaagatagcttaacgctcaatggacaaagtattgatgcacaggattaaataattacagatgaaaagctaaaataatttatagccgatcatcacatctggcttggctatacctgaaaagatatatacaagccttttttattattgagaaaaacgctggatttatccgtaattttaattgaagcattaaatgatcttcacagtttctctgcattttgcgcgtacagtattcaacatgagagacatcagatgtaaacgaggatgcatcatgaaaaagttgttcaccatcttagccctttgcatcactgtactgaccaccagtatggcaagctttgctgatcctccttttgaccgaggacatggcccgaaaggtcctaaaggcggacctcgtggtgaatggaatgatcgtgggcataaatttgaccgtgacgataatggtgatcgtgttcgcgatgaacgccgtatgcgtgaggaacgtggctttgagcgtctgaaacaacatcgttggcagccaggttatgtgatgccacagcactatcgtggtaatggttataaagtcgactataaagacaataacttacctaaacccgatcgtaaccagcagtggtacaaaattaacaatgactatattttagtcgacacggactctaacagtattgtgagtattcgcggtttctaagatagatagctcctcactatcgcttagtaggaaaggatgaagctgatcggctttatcctttttttatttttatatcaatataatataaaaatttaaatcttctaaatttcttcttatttcatagaaaattttcacatttattattcttcgccttcacgatttatctgtaatttttcactaatcttcaattatcgaaatttaatagatcattcgaggtttacgatgaaaaagataacaacagcaattgttctttcaatgagtggtttaatcgcaacaacagcaatggctgcgcctcacgaccattatcaccaccaaggttatgagacaaaaaccgttaaagtcattcataaagatgaccatgcgaatatctggcgtgcaggccaagtcgtaccgcatcaataccaacatccacgttatgtcattgactaccgctcacaccagaaattgactaagccaggtcgttatcaaaaatggtataaggtgaacggaaattatgtactcgtaaatgagcaaagccataaaattattaaagtaattcgttaagttcataaaacatctaacacccaaagctaatttgggtgtttttttatctaaaacatgcggctttaatcttttttgtttagaatcctctttatatctttttgctgttgattcgagatcggtatgccaactaagtctttagagaaatcacataataatacccagcattatgtacattggttccgacattcagcaccctacatcaatgcgcatcgtgataaaacttttgttttaatgtttggcggtgaagcagtccgcgatcctaatttcgaacatattattcacgatattgccttattacattctcttggcattcgcttaatcttagtgcatggcgcacgtccacaaattaatcacaaccttaaagaaaaagggattgaaacccctttttatgataactgccgtattactacacgcgaatctttaagctgtgttatgagtgctgtaggatctattcggttagaaatcgaagcattgttatctatgggtttagctaactctccaatgtatggcgctcgaatagatgtcgtatcaggtaattttgtaaccgctaaaccttatggtattcgtgaaggaatggattttcagcttacaggcgaagttcgttcaatagatacagacgcgattgaacgtcatcttgataacaataatattgttttacttggcccaacgggctattcaaccacaggtgaagtatttaatttaagagctgaagaagttgcaaccaaaactgcgacttatttaaaggcagataaattaatctttttaggtgaacaacaaggtttacctaacgaagatgggcaattactgcgtgaattaagcccacaccagcttgattactatattcaacaataccaaaccacacacccaaccctaaccctacatttgcaagaagcaaaaaaagcatctttatcgggtgtacatcgtgtccatctaatttcttattcttatgacggtgcacttattgaagaactctttacgcgtgatggtgtgggtaccatgattaccgatgcgcattatgaagaagttcgtatggcgcatattcaagatgtcggcggcttaatgaacctattacgcccgttagaagaagaaggcattttggtgtatcgctcacgtgaacgtttagaacaagaaattaaccagttcgctgtcattgaacgagacggtatgattttggcctgcgctgccctttatccgattccgactgagtttaatgaaacacgttcagcagaaattgcttgtgtggcagtacacccaagttatcgtaaatcaaaccgtggcagccaaattctgcaatttctcgaagaaaaggccaaacaacaaggtattcgtcaattgttcgttttaaccacccgtaccgcgcactggttcttagaacacggtttccatcaggtgagtgtggatgacttaccaaatgcccgtcaggcactttataactatcaaagaaattctttagtctttaaaaaattgcttccctagactatgcattttttaagatattcttatttcagataagcttagtctaaaaagtacaaccataaaggtaattaatgtatggttgtacttttttaaatctttaaatttttgctattttaataatttttattttatttacacatacttaaatatctttttataaatattattctgttcaataaatcatttttttgcataagtttatcgccgaaagtttttagcttttttttgtataaataaagactgaatatttattttttacgaaataaaaatccctttagggtatctgctcatccaattatttttctttttctctttcggggagcacgaaaccacatggcactttttaattccacttcatgggcaaaatattcagtcattgctgccagccttgcgggagtgatgatgctaggtggttgtgccaaaaaagaggagcacaccacaacaactttaaatatcggctatcagaaatatggcatccttcctattctaaaagcacgtggtgacttggaaaaagcgctcaaagatcaaggcgtacaagtgaaatgggtcgagtttcctgcaggacctcaattacttgaaggcctaaatgtaggaagtgtttcgttaggcgaagcaggtgaagcaccacctatttttgctcaagcagccaatccaaatttagtctatgttgcaaatcaacctgctgcaccaaaagcagaagcgttattggtacaaaaagattctccaatccagtctattaaagacttaaaaggaaaacgtgtcgcactgaataaaggttcgaatgttcactaccttttattaaaagtcttagaagcaaatcacttgagcttgagtgatattcaacctgtttatttaccaccatcagatgcgcgtgctgcctttgaaaaaggagctgtcgacgcatgggtgatttgggatccgttctttgcagcagctgaacatcaaattcaggcccgcgttctggcaacaggtgaaaacttggtaagcaatcatcagttctacttagctgatcgtaaatttgcagaaaataatccaaaagttctgaacacggttgtacaaacgctaaaccagacaactgaatgggtcagcacacaccaagatgaggctgccaagctactcgaaaaacctacggcacttgagtttgatgtactcaaaacatccatttcacgtatgggttttggagttcagccaatatctgacaaggtagcccaagaacaacaatatgtagctgatgccttctacgcgcaaaagctcattcccaacaagctcaccattcaagaagccattttaaaactgaaataaacccagcttgggcacagcttaaataacgatataaatgctgtgccttgtgttaagggaacaaggatatcaatatgcaacatcagtcattatttaataagagtcagtggactcagttagttaagcgctttagcgcggtcgctgtattaggtttaacaatcgcagcacctgcttgggcaattgacccaacagtgaaagaacttcgtattggttttcaaaaaagttcgattaacttcgcgattgccaaacagcaaaaactatttgaacaagaatttccaaatgccaaaatcacttggaatgagttccccgctggccctcaaattttagaagccttagctgttggctcactcgatgttggcgttactggagacacgcccccggtctacgctcaagccgctggcaagcctttatattacattgcttatgaagcagccaaaccattggcctcagcaattttagttcccaaaaactcacaactaaaacagcttaaggacctaaaaggtaaacgtattgcgctacagaaaggttctagctcacattacctacttgtacaggccgtacgtaaagcaggcttaaaatggagcgacattaccccaatttggctcacacctgccgatgctcgcgctgcattccaaaagggtgctgttgatgcatgggcaatatgggatccgtactacgcttcagcacaactagaagaccaagctcgtgttcttgcatctggtaaaggcctaagcccgaactataccttttacttagccgctccaaattttgttaagcaatatccaaaagctgttccaggactcatcaagcagatcaatcaagctgacaaatgggtccaaagccatcaagcagaaactgcaagtgcgattggccaaagtacaggcctaaaacctgcgaccagtgacttatttattaaacgccgtccacgtccatcatcggcagctccacttaacagcaaagtcattgctgaacaacagcagcttgcagacatctttactcaacaaggcatcatccctaaaccaatcagcattaaacaagctgtttggggtgccaagtaatttcaatagatatataggtaatgcacatgaaaattttctggtttattcctacccacggtgatagtcgctatttaggtacaagtaaaggcgctcgtcaggttgaccatgcctatatgaagcaaattgctgtggcagtagataacttgggttacgaaggggtacttattccaacaggtcgttcatgtgaagatccttggattacggcggctagcctaatcgatgcaactcaacaccttaagtttttagttgcattacgtccaggggtaacaacaccagcgttggcagctcgtatggctgcaacatttgaccgcttgtcgaatggtcgtgttctactcaacttagtgacaggtggcgatgaagcagaactacgcggtgacggtttatatgaagatcactcaacgcgttatcaaacagccaatgaatatgtaaaaatctggcgtgaaattttgacgcgttcacatacgggtgaagcttttacattccacggtgaacgcttacaagtagatgatgcaaagctactttacccacctgttcaaaaaccttatccaccactttggttcggcggttcttcagatgtcgctgttgaactcgcggctgagcaagttgacacctacctgacttggggtgaaccaccagcagccgtgaaagaaaagatcgaacatgtccgtgctaaagcggaggctaagggccgtaaattaacttatggcattcgtttgcatgtcattgttcgtgaaaccaatgaacaagcatgggcagcagctaacgagcttatccaatatctggatgatgcaactattgctgcagcacagaaaaaatttgcacaaatggactcagtgggtcagcaacgtatggcggctctacacggcggtaatcgagacaaacttgaagtatccccaaatctttgggcaggtatcggtctagtccgcggtggtgcaggtacagcacttgtcggcgatcctgaaaccgttgctgcacgtattcaggaatatgcggatttaggtatcgatacctttattttctcaggctatccacaccttgaagagtcaatccgttttgcagagttagtattcccattattaccaatcgagacccgagctaaacttgctcaaccaaacttaaccggtccattcggtgaaatcattgccaacaactatgttccagacgagaagaaacaaaatagttccgtcaaggagcctgcatgagcaaagatataaatattgtttcacgtggaacgaaacaagtcgggcagcgtctgctgccttggatttttccgattgttctattggttgtctggcaaattgcatcgagttcagggcttttagaaaatcgtattctgccggctcctacggctgtcgtttctgctttttggcatctactcattagcggcgagctttggcaacacgttaaagtcagtgcaggacgagccttactcggactatttattggtggtggtttaggtttgctattgggtctgctcaatgggtcttcgcgtttcgcctctaccctgctcgatacaaccttgcaaatgattcgtaacatcccagcattagcacttattccactggttatcttgtggttcggtattgatgaaacagccaaattatttttggtggcggtcggagtcttcttccctatttatatcaacacgtatcacggtatccgttcagtcgatccacaattaattgagatgggaaaaagctatggtctttcacgttggcagctttacaaagaaattattctaccgggtgcgatgccctctattttagttggtttacgttttgctttaggtctggtttgggtgctgctcattgtagctgagactatttcagcacaagcaggtattggctatatgactatgaatgcacgagagtttttgcaaactgatgtggtcctggtcggtattcttctttatgccctattaggcaaattagccgatgttctagcgcaacttttggaacgttatttactacgctggcatgccggttatcaaaaataaaggagcttagaatatgacaaatctgaatttaaatattaatcagaatgacgtagagctcattccagaaaaccatccagagttacaagaacctgtggtaggcgcagagattctgattgaacagctttataagttttatggtgaagttaaagttcttgaagatcttaaccttcatattcaaccgggcgaatttttagctattgttggacgtagtggttgcggtaaaagtactttattgcgcttaattgcccaacttgaaaaagccagttttggagaaataaaatttaaatctgcccgacatttgcgtgaaggtattactaacgatgacatacgggttatgtttcaagacccacggttacttccttggagaaatattcttcagaacgttcaacttgggctaccaaaatcacaacatgctttggcagaagaattattagagaaagtaggtttaaaagaaaaagcgggacaatggccttcacagctctctggtggacaacgacaacgtactgccctagcccgtgcgttatctcatactccccgtattttattgttagatgaacctttgggtgcattagacgcgttaactcgtcttgagatgcaaagcttgattgaacgtttatggaaagagcaaggttttactgccattttagttacacacgatgtaagtgaagcagtgcaactggctgaccgcattatattgttagataaaggtcagattgctcaaagttttcaagttaatttgccgcgtccacggaaaaagagcattacttttgctcagcttgaacaacaagtactcgatgccgttttagccacttaaggttgagatgagtaatgagaaccattcaaccgaaaaatgcccaattaacgagcaataaaactgatgatttattgctcttttttagggcgaagattaaaaaatatttttaagaataacaataaactagtgaatctctctattttttgcacaatagtatatctattgctcaaataactatccgttttttcactaaaaaagtgagacacctgtgcacaaatcaaacgatttaccttacaatgggaacactatctttttaatttatgcagcaaatggaacaaaagaagagtacccaaaagcgcaatcagcttcttgctgccgcccttgatgtgttttcactatatgggttcagtggcgcaagtctggatgaaattgcccaactcgctgacatgcataagtcgaatattttctattactatgaaaataaagagtctttatatgtggaagtgctgaccacagttttacaaaaatggctagctcccttacaaaccttagaagctgagttagaaccagccgaagccttgtctcattatttaattcaaaaaatcgaactttctcgtagccaaccaaaagcttcgcgactatttgctttagaaattattcaaggggcaccgcatattttgcctatactgaaagggcccttgaaaaagctatttaagcgcaaagctaaggtcattcaaacttggcaagagcaaggaaaaatttcaccggatatcgacccggaacttttaattctcaatatttggggtcttacgcaaaactatgccgattttgcaactcaaatggaaatggtaaccgggaaaacgcttcgtaaccgcagtatgttccagcgttcgattgagcatacggtacatatgatgctctacggcgtattacctcgctaaaataaaaaagatcggcaaatttgccgatctttttttagaaatgattttgataaagtgctaaaagcttttgtgcacccaataataagttttcttcccaatccaaatgggccgtatcatctgccccatcagtaatatatttcaccgaaattaaacgtacacctaacttgtggcaaacttttgctaacgcatagccttccatatcgaccacatcacaagcgaccttcggctgacccgtttcaaatgagtcccctgtcccacaaattccttttggtaaatccgcaaaatgcgtttggagatgaatttcagccgccaaatgatcatctaacggcgttaccccaacttcaaatcctaaaggtgaaacgtccatatcacgttgtacaaaagtttttatttctactaaatcgtgccgattaaaagatgaacttcctgctgtacctaagttaattaaagttttacagcttgttttttgaataacttcaaacgctttaaaagcagcattgatcttaccaataccactgtaatggacttcgatacctgcttgctcgaataaacctttagattcgttgggaagtgccataattaaagcggtatcagtgttcattcaaaaagctcaaatcagaattaacaaaattagaaagtaagtataaatcaggtgcaaaagctttttgcaccttttcacctttactgcattctttgttgtaaagccactaaacatggagagaagaatagcttgccactgtatgctccggctaaggttttcttcattaccacgctccacatcactaataataaaatactgaatgctacagcgacatattgtaaaaatacaacttcaatctgatgacctaaattaaataaagccaaaataaacacaccaaatgggaaggttaaaccccaccaacccaagttaaatggaatacctgtctttgcatgacgaagtgttgttaaaatcgcaaggccaagccaccataacccaaagcctaaaagtaccagactacccacaacgcccaaggctttaaatacatgggccaactcaggaaagccaacatttacaaatactctttgtgcctgctcacctagcaacaatagacctaaagcacctgtcccaatcggacctaaagaaagccagctagaaatcgcgacttctttttctggtaactgatgcaaagccatacgcaacattaaaatcgttaaaatggcaaatgcaggtaaaacagagattccccaaagtacgtaacccgctaacaataaatgaaagctatgcacatctgctggtaaatgtgcaaccaacatgcccgcagaacttgctgcgacttcacatgcaaccactggcaaaagccaaattgcagtcatggtatgtagttgatgattctgacggctaaacatacaaaatggtacgatccacgcaattgctagtgctaaaaagacgtcgatgtaccacaaagcttgggcgatatgaactgccacttcgccgtaaagcccgattccgaagcttaaaaagccatttagtatggttgcaagccccatcggtatagcacctaaaaacaagctcatatttggatgattaaatatttgcttcgcttcatgcgggaagagtaaccaccgcaataaatagagaactgaaaaaacactaaatagaacaatattaaattgccataacagcgtagccagcataaataaaaatgatttggcaaatggaagctgaattaaaatcatactgaccacgccagtacccatagttgctgtaaaccaatttggggtaaaatgccgtataacatctttactttgatttaattggtaaaagggtcttttcatcttaagtctctaatcaaagagtggatgaggctatagtaggataaattaataataagaaaaattgatttatttttatttaattcatcaattttttagatataaaaagtattcgtattgaaaaatacctgagtaaaaacacaacaacaagacgaatctgtgagattatggcaatatatagcccttgcaaaaatagccatattttaagttcatgaaactgcttcgtcttaatgcgttatcgcccaatttccagttaccacaaacagcggtaactattggtaattttgatggtgtccatttaggtcaccaagcgatgattgctcaactcaaaaaaattgctgcagcacaaggcttaaaaacattggtcatgatttttgagccccaaccgcttgagttctttaaaggctacgatgccccacctcgtattaattcattacgggaaaaagttgaatatctagctgaacttggggtggattacatcgcggttgccaagtttgaccagcatttccgtagcatgagtgcttctgagtttgcagatctattaaaagacaaattaaatgctcaagctttggttttaggagatgactttcatttcggcaaagaccgtcaaggcaatagcgaatttttaaagaattacggctttcaagtcacaaatttacatacgattgaactcgaaggtgaacgcgtcagttcaacccgtattcgccaagtgcttcaagtgggtaatctcgctttagcagctaaattattaggccgtccgtacagtattaccggtcgtgttcaatatggtgaccaaattgggcgaactttagatttcccaacgattaatgttcgtctcaaccgccataagccttgtttaaatggtatttatggcgttgaagtcatttgcgaaacaacttcgctaactcaaaaagtgcttcaggataatcctgaaaagcccggaattgccggatatcatgaaaacagcctctatggtgcaggtcatgtcggtacacgtccagccattcagcaagaacatccagagtggagattagaagtacatttccctgatgtttctgctaatctgtatggcttatttatgcgggtgacttttcttcactatcttcatggtgaattgaactacccttcgcttgaagcacttaaggcaggaattgataatgacgtgcagcaattacgacaatatcgtaacgacacgacacaatttcctttttaattcgaattttgattgtaaaacatgtcggctcccaagctgattaaactggaagacaacttgcatgagcgataagcaaactactgaaaatgcagtggactacaaagccacgctaaacctgccggatactcaatttgcaatgaaagcaaatttggcagtacgtgaagtgaaatggttagaagagtggtataccgacaacatttatcagcagattcgtgcatcgcgtattggcaagaaaaaatatattttgcatgatggccctccatatgcgaacggtacaattcacttgggccatgcggttaacaaagtacttaaggacatcatcgtaaaaagccgtactttggcaggtttcgatgcgccatatgtaccaggttgggactgtcacggtttgccaatcgaactaaaagttgaagaaaaagtaggtaaagtgggtgaaaaagttgatgcagccactttccgtaaacactgccgtgaatatgcgctaaagcaaattgatttacagcgtactgactttaaacgtcttggtattttaggggactgggataatccttatctcaccatgaactacaaacaagaagccgatatcgttcgtgctttaggtttaatccaaaaaaatggccatatccagccgggcttaaagccagtgaactggtgtatggactgtggctcagcacttgctgaagctgaagttgaatacgaagataaaaaatcagacgcaattgacgttggttttggcgttgtagatttaaaagacttaagcgctcgtgtaaatgtagatattcaagatccaacggatatcgtgatctggaccactacaccttggacgttaccagcgaaccaagcagttgcattgcatgccgaaattgaatatcaattggtacaagtgactactgaacgtggtaagcagaactttattcttgctaaagacttagttgcttctgcaattgagcgttacaagcttgaaaacccagttgttttagctgactttactggttcagctcttgagaaccttaccctacaacatcctttactaaccgatcgtcaagttccggttattttaggtgagcacgttatcgcaacaagcggtacaggtgcggtacacactgctcctggccacggtgcagatgactataaagtaggtcttcaatacaaccttaaagttgaaaacccagtgggtggtaatggtgtttacttaccaaccgcaccaatctttgctggcgagcacatctataaagccaatccaaagattattgaagctttaggtgctgtaggtcgcttatgggctcatcaaccgattaaacacagctacccacactgctggcgtcataagactccgattattttccgtgctacaccacaatggtttatcagcatggatcaaaaaggtttacgtgacggtgcgcttaatgccattgaaaacgatatcgagtttgtaccgaactgggggaaaaaccgtattgaatcaatgatcgaaggccgtccggactggtgtatctcacgtcaacgtacttggggtgtaccaattcctttcttcgttcataaagatacgaacgaattgcaccctcgtacgcctgagctcatcgaagaagttgccaaacttatcgagaaagaaggtattgatgcatggtttaaccgtgatgcgaaagacttcattggtgaagatgctgaacagtacaatgctgttcgcgatacgcttgatgtatggtttgactctggtacaacgcattacgctgtacttgagcaacgcgacgaattagaaagtcctgctgacttatatttagaaggttcagaccaacaccgtggttggttccaatcttctttattaacgtctatggcaattcacaatcgtgcgccatataaagccttgttaactcatggttttacagttgatgaaaatggccgtaaattgtcgaaatctttaggcaactatattccgcttgaagaaatcatcaaacaacttggtgccgatggtttacgtttatatgtagcatctagcgactatcgctatgaaattgcagcatcgaaagaaatctttagccgtgtaagtgatagctaccgtcgtattcgtaatacgctacgcttcttacttgcaaacttaaatggtttcaaaccaagtactgatgctctggcagtagatgatcttattgctcttgatcaatacatcttgcaacgtgctaatgaagtacaacagaccattatcgcggcctatgaagaaatgaacttccacgtcgtgtgtagtgcgttaacaagcttctgtattaatgacttaggtggtttctatctagacatcatcaaagaccgtcaatacaccactaaggctgactcacaagcacgtcgttccgcacaaacagcgctttaccatatcgtacaagcatttgttcgctggatgagccctatcctaagcttcacagctcaagaagcttggccacttatcccagaacaaactgacaagtatgtatttacagctgaatggtatgacctacctgtttcatcaaaagcaaacttgctttctgaagcagattggcaaacattgattagcgtaaaatctgcagtaaataaacagattgaatcagctcgtaacgctaaacttgtcggtagtaatctttcagccaaagttgaactttgggcaaatgaatcattacaaacagttttaaaccaactggctgatgaactccgttttgttcttattacttcgcaagtagtagtacatccatttgctgaacaaggtgaagcaactgaaatggaaggcttacgtgtacaagtatctgcagctgaaggtgaaaaatgtgcacgttgctggcatgtccttccggatgtaaatacacatgccgatcatcctggtttatgtggtcgttgtattgtgaacgtcactggtcgtggcgaagtgagaaaatatgcctaattcacaagctaaaaaaggcttattccagttttatcctcacaacctcatttggcttggactttctgtccttgccattgtgttggatcaatggacaaaatggattgcaagtacacatctgaactacgcagatcctgtacctgtgcttccatttttaaactggacactattacataactatggtgcagcttttagctttttatctgatgctggaggatggcaacgctatttcttcacatctttggcaggcttagtttcaatactttttgtattttggttgctacgtatgcctaaaaaaatggtggtgctacctgtagctatcgctttaattttaggtggagcacttggtaatctaattgatcgcattactttagggtatgtggtcgattttattcatgtttattaccaaaatcatcactttccagcttttaatattgcggacagtgccattactctaggtaccattttgctactcatcgatacattcttccttgagaagcaaagacctaaaaattcggatgcataatatgaccgaaattattcaacctaatgaagaaattcgtattactgacggttctaaagttgacctacacttttctgttgctatcgaaaatggtgtagaaattgacaatacacgtagccgtgaagagcctgttagcttgactattggcgacggtaacttgttaccaggttttgagaaagcgcttcttggcttacgtgcaggcgatcgacgtacagtacatctaccaccagaagatgcttttggtccgtggaatcctgaaaatatacaaacttttgatacagttaaattcgaacaacgacctattcctggtcatatgatcgagtttgaagataaagcaaaagcaactttatttggtgttgtgaagtcagtaaatgatgatattactgaaattgatttcaaccatcctctagccggcaaaaatattacttttgaagtagagatatttaaagtgactccagctggtcagcaaggcattaagatcatgtaaaaaaaagccctcgattgagggcttttttattatttaacttttattgatgacataagaatccttacaaattctatattctcacgcacctatataatgaattaagttataaagataaaaatccttaggaaaaacatatgctggtctatattatcgtcggaagtgttcgcgaagggcgcacagctattaaaattgccaattggttagaaacaacaataccctcatttaatctaaaagattttcaaacagaagtaattgatttaaaagaatggaatctacccttattttcaggttctcacccacctgctacaggtatttatgatcaacctaaacaacaagaatgggctgataaaattgcccaagctgatgcatttatctttattagcccagaatacaaccacggttacagcccagctttaaaaaatgcactggactatgttggtaaggaatggagcggtaaaccagcagcatttataggttatggctcaacaaatggttctcgttctattagccaaatacgccaagtcacttcaagtttaagtattgttgacccaaatgctgtaatagaaatacgagatatcttcaaacgcaataaagatgaaaaattcgaagccaatgaatttgaagtaaaaggacttcaatcaattgttgagaaactacagaaatatcatttgtcttaaattgaacaaaaagcctcctttttaaataaaaggggctttttaattttataaactttttaaataattcactatgtcagtattacccgccatttctgcaagctgtagtgctgtatattcgcttttataagggacatgcgcccctttttcaactaatagcttcactatatctaaatgatcattctcagccgccgcttgcaaagcactatacccttcatcatcagtctgattagggtcttctccatctattaataattgttttacttgctctagatcacctaaagatgcccaataaatcagttctggaagagagagttcttcatcgtcttcaggtatgggagagaaagaattaattttcactgggacaccaaaaataaaaaacttcctcattatatccatagaatcgagtaagcatccaaaaatgatttgtagttctatatttaaataattcttttctgattgatttacctgcaataaaaaaacacccccaaccattggttgggggtgtttggaataatgagctggcgatgacttactctcacatgggtaatcccacactaccatcagcgctaagaggtttcacttctgagttcgggaagggatcaggtggttcactcttgctatggtcgccagcacaactgtttatggatacttgcttgggtcttacttgatgccgaagcgttttccaaatctgtaacagactgggctgattgaatctgatttttgttcattttagctaagcgtttaactaaatcaagttgctttgcatgtttatagaatcgattgatgctttatatacaactgcttgggtgttgtatagtcaagcctcacgagcaattagtattggtcagcttcacatatcactatgcttccacatccaacctatcaacgtcctagtctcgaacggctctttagaggacataaagtcctagggaaatcttatcttgaggtaggcttcccgcttagatgctttcagcggttatcccttccgaacatagctacccggcgatgcgactggcgtcacaaccggtacaccagaggttcgtccactctggtcctctcgtactaggagcagatcctctcaaatttccagcgcccacggtagatagggaccgaactgtctcacgacgttctaaacccagctcgcgtacctctttaaatggcgaacagccatacccttgggacctgcttcagccccaggatgagatgagccgacatcgaggtgccaaacaccgccgtcgatatgaactcttgggcggtatcagcctgttatccccagagtaccttttatccgttgagcgatggcccttccatacagaaccaccggatcactaagacctactttcgtacctgctcgacttgtgggtctcgcagttaagcgcgcttttgcctttatactctacgcgtgatttccgaccacgctgagcgcaccttcgtactcctccgttactctttaggaggagaccgccccagtcaaactacccaccagacacggtcctcgtcccggatcacgggacagagttagaacctcaacattaccagggtggtatttcaaggacggctccactggaactagcgttccagcttcaaagcctcccacctatcctacacaagtaaggtcaaagttcagtgtcaagctgcagtaaaggttcacggggtctttccgtctagccgcgggtacactgcatcttcacagcgatttcgatttcactgagcctctgctggagacagcgccgccatcattatgccattcgtgcaggtcggaacttacccgacaaggaatttcgctaccttaggaccgttatagttacggccgccgtttactggggcttcgatcaagagcttcgcttacgctaaccccatcaattaaccttccagcaccgggcaggcatcacaccctatacgtccactttcgtgtttgcagagtgctatgtttttaataaacagttgcagcggcctggtttctgcggctgtcgtcagctcaggaagcgagttccatcaccaacaacagcgtaccttctcccgaagttacggtaccattttgcctagttccttcagcagagttctctcaagcgccttggtctactcgacctgaccacctgtgtcggtttcgggtacgattcctgtgtaactgaagcttagagacttttcctggaagcatggcatcaaccacttcgctgtacaagtacagcttgctatcagatctcagcatagagtaccccggatttgcctaagatacatgcctacatcctttcacctggacaaccaacgccaggctgatttagccttctccgtcctctcatcgcattacacagaagtaatggaatattaaccattttcccatcgactacgcctttcggcctcgccttaggggtcgactcacccagccccgattaacgttggactggaacccttggtctttcggcgaacgggtttttcacccgttttgtcgttactcacgtcagcattcgcacttctgatacctccagcatgcttctcaacacaccttcatcggcttacagaacgctcccctaccacgtatacaaagtatacatccgcagcttcggcacatagttttagccccgttacatcttccgcgcaggccgactcgactagtgagctattacgctttctttaaagggtggctgcttctaagccaacctcctagctgtctatgccttcccacatcgtttcccacttaactatgattttggggccttagctggcggtctggattgttttcctcttgactacggacgttagcacccgcagtctgtctcccggatagtactcataggtattcggagtttgcatcggtttggtaagtcgggatgaccccctagccgaaacagtgctctaccccctatggtattcgtccgaggcgctacctaaatagctttcggggagaaccagctatcaccaggcttgattagcctttcacccctatccacaagtcatcccctggcttttcaacgacagtgggttcggtcctccagttagtgttacccaaccttcaacctgctcatggatagatcgcctggtttcgggtctatacccagcaactaaacgccctattaagactcgatttctctacggctcccctatacggttaacctcgctactgaatataagtcgctgacccattatacaaaaggtacgcagtcacaccacgaaggtgctcccactgcttgtatgcatgcggtttcaggatctatttcactcccctcacaggggttcttttcgcctttccctcacggtactggttcactatcggtcagtcaggagtatttagccttggaggatggtccccccatattcagacaaggtttcacgtgcctcgccctactcgtcatcattatgtgtgccctttcgtgtacgggaatatcaccctctacgttcgcacttcccagagcgttccactaaaacacacataacttaatgggctgatccccgttcgctcgccgctactgagggaatctcaattgatttcttttcctaagggtactgagatgtttcacttcccctcgttcgccttgcaacactatgtattcatgttgcaatacctaccttaaagtaggtgggttcccccattcagacatctccggatcaaaggatatttgccgcctccccggagcttttcgcaggctatcacgtctttcatcgcctctgactgccaaggcatccaccacatgcacttaattacttgactatacaaccccaaacagtcgatgttacctacaagttagtaacttcaacatttcagtttagagcactgtgcacttaagcaccgtacagcttcaatctaaattcacataccaaaacgcttgattcagttaatttgctagttctcaattcatctagattaattgcttaacctaaactcttgagtgaacaatttatttcagactcaattttgccaatctgttaatgagttaatgtgtcttcgtcagatcacactaattaccgtgataatgaaatcacagaagttaataaaccaagatctcaatctttatttactaatttctgtaatccaaacttatcttaagttctggtggagactaggagagtcgaactcctgacctcctgcgtgcaaagcaggcgctctaccaactaagctaagtccccagcttacatcatcaatcatgtatcttttatctataacttcaaccagtcaaagtcatggtgggtctgacaagacttgaacttgtgaccccacgcttatcaagcgtgtgctctaaccaactgagctacagaccctcagatacatctatgaagaacaacttgttgtggattcttaccaatcgtcaatctttcgttaaggaggtgatccagccgcaggttcccctacggctaccttgttacgacttcaccccagtcatcggccacaccgtggtaaccgccctctttgcagttaggctagctacttctggtgcaacaaactcccatggtgtgacgggcggtgtgtacaaggcccgggaacgtattcaccgcggcattctgatccgcgattactagcgattccgacttcatggagtcgagttgcagactccaatccggactacgatcggctttttgagattagcatcacatcgctgtgtagcaaccctttgtaccgaccattgtagcacgtgtgtagccctggccgtaagggccatgatgacttgacgtcgtccccgccttcctccagtttgtcactggcagtatccttaaagttcccatccgaaatgctggcaagtaaggaaaagggttgcgctcgttgcgggacttaacccaacatctcacgacacgagctgacgacagccatgcagcacctgtatctagattcccgaaggcaccaatccatctctggaaagtttctagtatgtcaaggccaggtaaggttcttcgcgttgcatcgaattaaaccacatgctccaccgcttgtgcgggcccccgtcaattcatttgagttttagtcttgcgaccgtactccccaggcggtctacttatcgcgttagctgcgccactaaagcctcaaaggccccaacggctagtagacatcgtttacggcatggactaccagggtatctaatcctgtttgctccccatgctttcgtacctcagcgtcagtattaggccagatggctgccttcgccatcggtattcctccagatctctacgcatttcaccgctacacctggaattctaccatcctctcccatactctagctcaccagtatcgaatgcaattcccaagttaagctcggggatttcacatccgacttaataagccgcctacgcacgctttacgcccagtaaatccgattaacgctcgcaccctctgtattaccgcggctgctggcacagagttagccggtgcttattctgcgagtaacgtccactatctctaggtattaactaaagtagcctcctcctcgcttaaagtgctttacaaccataaggccttcttcacacacgcggcatggctggatcagggttccccccattgtccaatattccccactgctgcctcccgtaggagtctgggccgtgtctcagtcccagtgtggcggatcatcctctcagacccgctacagatcgtcgccttggtaggcctttaccccaccaactagctaatccgacttaggctcatctattagcgcaaggtccgaagatcccctgctttctcccgtaggacgtatgcggtattagcatccctttcgagatgttgtcccccactaataggcagattcctaagcattactcacccgtccgccgctaggtccggtagcaagctaccttcccccgctcgacttgcatgtgttaagcctgccgccagcgttcaatctgagccatgatcaaactcttcagttaaaatcattttgcaccttatttatagacaaggtgccaattctggctcatcaattactgacttaaatttcgctcaaataaacttcgagtaatttaaaccaatcaatcaatgaaaattattttttttgattaatcaatcagtaaaaatccacacaagttgttcttcaattctcttaatgatttttctgctcctcatcagagacagaattcaacgcaatacaaaaccttcaccttaaccctgtaagctaagatattctcgtgtatcgcgtcgggatgagtgcattatagggaaaaaaaaccggtacgcaagcacttttataaatatgcgcgctcgaccggttctttttcagccaaataaaattttaaaaataattaaataactgatttatataaataatttatttttgagaatttttaatttttatatctactatctttataggttgttttggtacgttttgatgcatgccatagtttgatgtaggagcctgaacaatacggtcaactacatccattcctttgaccactttaccaaaaacggcatatcccggatttcctggtgaacggttaagaaagttattgtctgcaacatttataaaaaactggctagttgctgaatcaggatttgaagtacgggccatcgccaaagtacctcgtgtatttgcaataccatttcctgcttcgtttttaataggtgctcgtgttgtcttttcctgcatgttcgcagtcattccgccaccttgagccataaatcctggaatgacacggtgaaagatggtctctttataaaaaccagattttatatagcctttaaagttattcacactcattggtgctttatcatcgtataactctatttcgatgttgcctaaatttgtttgcatctcaactaaggtattcgcccatactgagtgactacttactcctaaacacaacaacatcagtaattttttcatattgccctacaacaactttataaataattaaccgttaaatctaatcgcctacggcaaacaattctagtgagtatttattaatagctttatatagcttttatattaatccacgttccacgtgaaacatggattaatcagcttagttaactatttttatcccaaaactttctaaagtttttactaatttcgatcgtataacgttttgcttttctagaaatcggagtcaggttaataaagccatgggtctgatccggaaattcttcataatgcattttcacgccattttgtcttaacttatgactatatattttagcttcatcatgtaaaacatcatgccccgctgtaatcacaaaagcaggcggatttttctttagattgccataggtaggtgaaattattggatcatcaagttctacattatgatgcgttgcataatattgagtgacatagtcaatatcagtatttgttaagactagcccttcgttataagcataaaatgaaggatgtctgcttttgaagtcgactgtaggataaatcaataattgtgcctgcggagcataagctttatttactgatctttgcgccacgacagtactaatatttccgccagcgctatcccctgcgacagcaattctactttttaatatttttaattgtctgcggttttgataaacccaagctaatgcatcttcacatgattgaattaaatgttgtggtgaaacttcaggtgctaaaggatagtcgatactgagcacctgtacttttgcatattttgctaataagcgacaaacctcatcatgagtatccaaaccacctacaacaaaaccacctccatgatagaacacgattaagggcagttttttattaggggcaggatgataatgcctagcaaagatagtcccgctttgtaggggtaagcgaatatcttctactaactcaatatcagttggtttttggcgtatggcctgcatttgtgcatcgaatgctcttcttgattcaattgggtctgaaccaataaatcccactctcccctgtttaatttgcacagccatcatgcatttcgtaaatgaatcgagatctggatattgataagagtatcctaaaattctagcgagagactcttgagctagtcgaggtaacctatcgagtgctcgagcagcaggaccttgccccttatctagcaatgtttgaattttttgattaaatgctgtcatgcctgtctccttgaatccctcttatccttcatattttctacagaattctttgttgtttgactatattcgcatacaactcatgcaatcaagatacaaaggtaaaaaccaatctacgctaatctgatttatagcaaatgtcattaacaaatctgtcgtttaaaacaggacttttttgccaattattgttaacagacaaaaagaggtactgctatgtcagcaaaactagttgttactttgttagcaaccagtcttttaactgtaggctgtgttgcttatacagatgatccttattatcgcggtggttatggttaccatgatcatgatgacgatcgttatgaccgtaacgatggacgtcgatatagtgagtgggaacgcaaacgttgggaagagcgtaaaagattatatgaacaacaacgcaaagatattcgcgaacaggaaaaggatcgtcgtgaatgggaaaaacgacaccgtgaatgggagaagaaacgcttagaagaccgagatcatgatcatagagattatcgtcatgatgactaaacatactacttctatataaaaagccccaaagcaataagtctcttggggcttttttgaggaatataaattctctctaatttatagaaaaatgagtagcagctcatttcatatatgtatcggcatcttgaacatatacgttctataaactcatatctcttatttttagcagcaaattactgagcagttgcagaacctgaaactgaaccagaagcgccagcatcaacttgacctggttgagcttgaccagaaacacctgcatctacaccaacaccagcttgtacgccagatgggctagcacttgtttgagcagaaccagaagcgtttaaaccagcttctgatgcacaaccaacagctgtaaatgcaacaccagcaagtactacagagataagacctaattttttcatgatagctttcctttcattacgacaaacatttaaatgcaaagttcatcttcgcgctgcctataattcacaattttttttctcaacgtgcgtatcattggttgtcttttgtagtaatagcggtacaaattctgcaattttttattaaaattactttcttaaatcaactatattattttataaatgaaactatagataagcacttgtttaattttatcaattttttattttttctctatttgacagatatattcaaaatatttccctttatagaaacgcaatacaagttgcgtagattgttacagagctttttgacttttaaaatcgatttttctctaagaaagccgtgaattgtcacagctttcttgaaagttaatatggcttaaacattagattatggccactgcatttcaccttttaccactttagcgccgagctctaagctatcaacactttgaagcgttgggtattgcttctgcatgagcttgctcagctcagtagcatttttagttgctttagctgctttttcataactatttaaatagttaatcgaaaagttaacagcatctaaaccttgtggagctccctcaaccatatgagcaggtacaacaattttaggttgtagtgctttgatgctttctaaagattgaataacttccacacgatctctggttttaggtgtatctgccatccataaatgaatacctgaagataccggaataccccccacgactgcttttgcagaaggaacccataaataagtaagctcttttttacctttaatctcgattgactcattctcaagttttaaagttttagcagtgtaagcttgaggcacaataatctggctaggtgcatttgcacccatttgtggcccccaatatttaactttaagcgcttgagtatcctgaatatgctttactgtttccggcgtagcaatgatctgtacattcgggaaatactgtttaaatacatctaagccgaaataataatccgggtcgccatagcttacgaaaatagtttttaatgttttaccgctatcgagaatatttgcagcaatacgtaatgcttcagattttgagaattgtgcattaaccagtaaaacttctttgtcgccttctattaaggttgaggtgacaccaaagtgctctggtttagccagaaaactctgaattttcagatcttgagcaagagctgactgagccatagttaatgccgtagcagtagcaagtgcggaagcggataatttaaataatttcattaggtattctcctgtttcatgaagaacactttaaattgcaatttatgtaagataaacgcactaatttaagataaactgttgcatatattgtaataatagctagacatatggatactttaaaagccattcaggtctttgtttctattgcacaacacggtaatttaactaaagccgcagagcatcttaattattctcgtgcaatggtttcgcgttatcttgagcaccttgaacatacattctcaactcgactatttcagagaaatacccgaaaaatatctcttacacccgcaggtgaaaaagctctgctctactgcgaaaatattttacagcagcaacaacttttgcaagaactcgcagcgcctgaacaacacaacggtacaatccgttttacatgcggattatttctatttgaacttggggttgcggaatgtattcggcaatttaagagacagcatcctcatattcaatttgatgtgtacctgactgaaagcacgatggatcttatagatgcacaagtggacttggcactacgcattactcaaaaagtcgcagatggtttaattgcacggccagtttgtcaaatcgaatccgttttctgtgctcatcctgattatttaaaacagcacagtcccctactccatcctcgtcaactcattcaacatgaatgtattgcacatcatagccaacatcaattctggacactttttgataatgaacaacaacctcagaactatcctctaaatgtcacttttaaaagtaatgatgtgaatgcactttacgatatgtgcttacatgcacagggagttgcaatgttgcctacattattagttgagaaagatttaaaagaaaaacgcttaaaagctttatttaaaaattttacggctccggagttaagcttgtcggtcgtgtatgcttctagacaacatttaccccgaatcactcaagaatttatagcttttatgatcgaaaatttagatttttacttaaaaccgcaaaattaaaagctttaaattgccgtgtacgcttgaatttttaggcaatgcccatacttcatccctattaatgaattacagcatatgcatggcagttcaggttttacacagtaaatactgatgccaaaaaggactgtacatgtttaaaaacccatttaaacggagatcatcaatggctaatgagcaaaacgagcaagctcaagacattcaaaatgagcaagttgagcaatctaacgagcaaactcaggctgaaggtgtagagcaagcaaacgacgttaccgttgaatctttacaagcgcaaatcactaaactagaagaaaatcttaagcttgaaaaagctcgtactgccaatgcagtttacgaagcacaaaaaagtgtagagcgtattcagcgtgaatctgagaagcataaagagactgtgcttgagaaatttgcaaaagaattgttggactctgtcgacaatttagaacgagcaattcaggcagctggcgatgaagaaacgcctgtacttgaaggtgttaagttaaccttaaagtcacttttaacgactcttgagaaatttggcgttgtagaagctgatactcaaaatggtttcaacgcagatttacaccaagctgttggcattgatccaaatgcaaaagcaaatgaaatcggtaccgttttacaaaaaggctataccttaaatggccgcttattgcgccctgctatggttatggttggtcaataaaatgagcaaaagcaaagcatctctttgctaaaagcccaagaatttgagagttttttgattttttttcataaaaatgcttgaaaaaaaccgattgactctcatatcgaataacaagcaaaaacattgcaacagaattttagaggaacacaccaaatggcaaaaattattggtattgacttaggtactaccaactcatgtgttgctgtacttgaaggcgataaagtaaaagtaatcgaaaacgcagaaggcgcacgtacaactccatcgatcattgcgtataaagatggagagatcttagtgggccaaagcgctaagcgtcaggcagtaacaaaccctaaaaatacattattcgcgatcaagcgtttaattggtcgtcgttatgaagatcaagcagtacaaaaagacatcggtcttgtaccttataaaatcatcaaagcagacaacggtgatgcttgggttgaagtaaacgataaaaaactagcacctcaacagatctctgctgaaatcttgaaaaagatgaaaaaaactgcagaagattatttaggtgaaacagtaactgaagcggtaattaccgttcctgcttactttaacgatgctcaacgtcaagcaactaaagatgcgggtaaaatcgctggtttagatgttaaacgtatcattaacgaaccaactgctgctgcacttgcgttcggtatggacaaaaaagaaggcgaccgtaaagttgcagtttacgacttaggtggtggtacattcgacgtatctatcattgaaatcgcggaccttgatggtgaccaacaaattgaagtgttatcaactaacggtgatactttccttggtggtgaagacttcgataacgcgttaattgaatacttggttgaagaattcaagaaagaacaaaacgtaaacttgaaaaacgatccacttgcgttacaacgtttgaaagaagctgctgaaaaagcaaaaatcgagctttcttcttcgaatgcaactgaaatcaaccttccatacatcactgctgatgcgactggtcctaaacacttagtgatcaacgtaactcgtgcaaaacttgaaggtttagttgctgatttagttgctcgtactatcgaaccttgtaagattgctcttaaagatgctggtctttcaacttctgacatctctgacgtcattttagttggtggtcagtctcgtatgccacttgtacaacaaaaagtacaagaattcttcggtagagagccacgtaaagacgtgaaccctgacgaagcagttgcaatcggtgctgcaattcaaggtgctgtattgtctggtgacaagaacgacgtattgcttcttgacgtaacaccattaactttaggtattgaaacaatgggtggtgtattaacaccaatcattgagaaaaacacaacgattcctgcgaagaaatcacaagtgttctctactgctgctgataaccaaccagcggtagatatttcagtttaccaaggtgaacgtaagatggctcaacaaaacaaattgttgggtaacttccagttaggtgacatcccacctgctccacgtggtgtgccacaaattgaagtatctttcgatattaacgctgacggtatcttgaaagtgtctgcaaaagacaagagtactggtaaagagcaatcgatccagattaaggcaaactcaggtttatctgatgctgaaatcgaagcgatgattaaagatgcagaagcaaatgctgaagaagaccgtaagtttgaagaacttgcaaaagctcgtaacgaagctgatgcattaatttcaagctcaaacaaagctgttaaagatcttggtgacaaagtaactgaagatgaaaaaacagcggtaaatacagcagtttctgaacttgaagcagcaacaaaagaaaatgatgttgaagcaatcaaagcgaaaactgaagccttacaaaacatcttaatgccgatcactcaacgtgcttatgaacaagcgcaacaagctggcggtgctgaaggtttcgatccaaatgcattccaaggtggtgatgctggtcaacaaaaagcagacgatggcgttgtagatgctgagttcactgaagtaaaagatgacaaaaaataatttgtctctttaaaaaagaccgcgcgaaagcgcggtttttttattgtttacaaaaaaataacaataatattttttatatattttcatgaacttaataggcaaaatagtcaattataaaaattaactgcttattatttatagatattttaaaaaattaaaatcactgttatgaaatccattaatttttccattaatgccaaacacatgtatttatttattctctttctttagcaagatcacaaaacaatcgctatctctggtcatttttatcactttgacgaataaggattatatcctaacaataagaatttatttatatttttatttttgccatgaaaaaatttctatggtggggaataagtttatacttcagtataagcttacaggtagctacttttgctcaaagcaatttatcaaatatttcttttaatcaacctttaaaatataggatggattatatagatccacgttttgaattaacgaaagaacaatttattcaaattggtaaagaagcagctgaaatttggcaaaaagaaactgggaaaacctattttatttatgattctcaagcagagcttactattaatttagtattggacaaccaacaagctactaaaaatgaaagaaaaaatagtataaatgagctattaaagcagcaggaagaatggagagagaaaaataaagctattcttttatttaaacaacaaattgatcaggaaacttctcttttgaataaagaaaaagaaaatctcaagtataaattcgaacaatatcaaaaagatgtatctctttttaatcaaggaaactatgggcaatttactcaaagcagtttaaacaaacgccaagctgagttaagccagctttcgttagaattacaaacaaagttttctcaacatagcaataaaatagaaatgcttaatagacaaattaagcaaataaatcaacaacaaaacctgcttaatcaatctattgagcaatttaatttgagcacgacttctggctcaaaaacttttcataaaggcttgtttagtcaaaaccaaattcagatttatggctttacttcattcgatgatttgcgcctaacacttgctcatgagtttggacatgcattaggtttaaaacacaccgataatcctaaatctttgatgtaccctcttttaagagagcaggatattcataacttcaaattaacaaattcagatttagatctattggctacattatatggctcaaatgacgaaaatcattaaaactaactgattaaataaactaaataaaataaaaactattcaatttttactaaaaaataatttggcatttggtaaaaaataatgagactcaagtctcattattttatcgaaattgtatattttttgattgatttttcattttatattcttataatacgttttttttcaaatctcccccctttgattatgcgtttaacttctttgttattaggcatggcctttgctttttctaattttcaggctaatgctaatcttgcgactcccctacacacccaagttcagcaaaaaaatgttcaacatttgacatataaaattgctgaagttgatcctcgttttggtttaagtcaagagcaattgatccagattacacagcaagctgctgatatttggaaagaaggtacaggtaaaaattactttacttatgacccaaatgcaaagttagaaattcgtcttgtatacgatgacagccaaaatcgttcagcagagcgtcaaaaaatcgcttctcagttcaaacaagaccaacaacgtgtaattgatgagcaacaacaaattaaacagttgaagcaaaatttaagtcaaactcaatcggatcttgaaaataaaaaacagatcttaaatgaaaaattgaagaattttgatcaacagatgatgcagtttaaggaaggaaaattagctcctgaatacactgcaaaatcactttcgaaaactcagaaagatttacagaaacagacagttgctttaaagaaagatatcgctgcttataatcagcaagctgcagacttaaataaaaaggttactcactttaaccagattaatgatgaattcaatcaatcattaaatcagtttaagcaaaatgcccaagctgatgtatttaagaaaggtatttataacggtaaacaaatcatgatctatgaatatagttctattgatgatttacgtttaacgattgctcatgaattaggccatgcacttggcttaaagcatagtgatcaaccgggtgctttaatgtactcagttcgaaaagatagcgataaaaaaagtaatattttaactgatgctgatcgtgatctattaagcgctttacctcaataattagatactgaactcatacgatgtatctattttataaatagatacatcgaaattcatgtcaaagtcatgttattgtggttgtaagagccgtctaaaatagaatggagatcaagatgagttattatcatatcctgattgaagtaaatgatcacattagtacgattgagcaaactcgagatatcgaactatttgatattattgaacttaaaccttatcttcattctattttattaccttacttcaatgagcaagaaattgagcttgaagatgaaaatattgaatataaagatattttacatctggaagttaagcagacattattgcctatcgagcacctaattgaagaagaacaaaagcagctaccaagtgatacagatgtcacaattactgcttatgaaatctttaatgaccgtgatttaagccaagatgttacctcagttatttttgatatattggaagcagttaagctagatcaatctatagtttagctgttcaataaaaaaggtctgcatatgcagaccttttttatttaatattttattgcatcatttttcgtgcttgttcttggcggaatgcacgtaaaatttgttgccctgcccgtcctgttggatttaaacctaaacgggtttgctcctgacgaatagcaacacgggttttatcgccaatcaatccatcaacagcaccaatatcataaccacgattaatcaaaaattgctgaatttcgcgacgctctgcacgtgaagtaccaggatcatcagttggccaagagctaacaaatggacctgctcctcttaagcgatcagacaaatgtgcaattgccagcccgtaactttccgcagcgttgtaactataaatagcatcaaaattcttaaatactaaaaatactggtccacttggtcctgctggagccattaaaccggctggcgtactaccagacaaaggaccttgtattagtggcgaaccatcaatccgtgttactcctcgcgcactccaactgcttaatggttttttcgagcgtcgtccttctccatcaattgacatgcctgctggaatttgaacttcaaagccccaaggcatacccgtctgccaacctgctttattcaagaaattagccgttgaagccaatgcatctgcagtactcgatactaaatcgcgtcggccatctccatcaaaatcaaccgctaagcgttcataagttgatggcataaattgagtatgaccaaatgctcctgcccatgaacctttaagttgatcttcggttaagtcaccacgctgtaaaatacgcattgtggcaaaaaactcagtacggaaataactttgccggcgcccttcacaacttaaagttccaagcgcttgtaataaaggatattttccagagatatcaccaaaattactttcaacgccccatactgctacaatggtttcagcaggcacaccatacacttgagaagcacgatttaaaacatcacggtgttgtgcaagtttttgttttccaagtgcaacacgttcttcatctaccaaaccagacaaataatcccaaatcggtgtcgaaaactctggttggtaatttaacttatcaatcaccgagtaatctggtgttaaattttgcgtatagcgatcataagtgctacctgaaacaccagcagcaatagcctgtgaacgtaaatttgccaaacagctctggaaattattattaggcgtataaatatcactattcgttactggaacagtcgcattactagatattgtagaaccattaattaccagctctgcttgagcctgggtcatcgccaaaaatacagacccaacaatacaagaaaaacgtcgcatattatcctagttcaatttttaaatttaaatttgtaagtaccataccattatggactcaaatttttcagagagaaatcgtaaatttgaattcataattacttctttaaattcatttccagagttttaaattcaaatttccctctctatttttgaatttaaaactttcctcacaagatgaattaatttttaaattcaaaatctgccctataatttaaattcaaaaacttcattttaaatttaaaaatccaagcccaacccacttgtggataactcataaaaccacacatctaaagcgccttacacactatattctttatgcttttcataacttttgtgaagtacaagcccttggctactcatgaatatacgttttaaatttaaaagtcaggcgcagttttgaattcaaaatatcattcagacgacatacatctttttaaattcaaaacaaacacaagctggagtaccagatttaaattcaatctttaagtattggggataacttattttaaatttaaaaactctcaaaacaacttatttcatttttaaattcaaaattagaacctttatttaaattcaaaagctcaacaaaagttatccacagtgagcaaataacaggtttttaatatttttttaaatttaaaagacaaaaaaagcgatccgaagatcgctttttagaaaatttaacttatttaaatggtcatatcatctgttaaagcgagtggttctggcaaaattttcgctaactgacggcataaattcgtcaattcattactatccacaggcattaacgtaatgtgacctaacttacggccagcacgttccgatttgttataaaggtgcagatgagcgccatttagtgccaaaacatcttcagttttaggatgctgaccaataatattgatcataaccgttggtcgaacaacgtctgttgaccccaatggtagtcctgcaacagctcgaatatggttttcaaactgtgaacatacagcaccttcaattgaccagtgacctgagttatgcacacgtggtgccatctcatttgcacacaagccttgttctgtcacaaataactctagagtcaatacaccgacatagttaagatgattcaacaaacgcgtaatgtagtcttgagcaacaggttgtagagcttcactattcggtgcaggtacgattgagtgagacaaaataccattgtgatgatggttttcagccaatggccaggtcttcacttcaccattttgaccacgtactgcaataatagaaacttcgcgagaaaatttcacaaaactttcagccactaagctttttgcaggtccaagttcagcccaagctgtatcaatttggtcttctgaacgaagtacaaactgacctttaccgtcatatccgccagttgcagtcttaagtacaatcggcaaaccaagctcagcaacagcttttttcaagctttctaggctatctacagcacgatacggcgcaacaggaatcgcaagttcgtcaaacaatgctttttctgacaaacgattttgcgcagttgctaaagcaatacggggagggtgcagtgttttagtttgtgttaacacatctacatctgcaacaggtgtattttcaaactcaagactgaaaacatcagcgctttcaataaactgctttaaaccttgttcatcttgactagaaaaaacttggcctaaaacacctgctggacaatctgtatttgcttcaaaaaaagtacattgaatatttaatggtaaagctgcttgcgccatcatacggcccaattgcccaccaccaaaaataccgatagttttatccatttcagcctcttaaacctgtcccggaatattgttgcttgcaactttatcagtttgtgcagcacggaaatctgcaacattttttgcgatttcaggacgagttaaacctaagatttgagcagccataatcgcagcattggtcgcaccagccggaccaattgccaaagtacctacagcgatacctgctggcatttgtacaattgaaagtaatgaatctacgccatttaaaattgatgatttaactggtacacccaatacaggtaaatcagtttttgccgcacacatacctggtaaatgcgcagcaccaccagcgcctgcaataatcacttgaataccacgatcacgcgcagtttctgcatattcaaacaaacggtccggagtacggtgagcagataccacttccgcttcaaatgggacaccaagttgtttaagcatattggcagtatgttcaagcgttgcccaatcggactgggaacccatgataattccgactaaaggttgggtatctgttgcgaccgcgttcattggcatttccaaagcgtaaaaatggtaaaaactcgacttgtaccaagccaagcatgagagaaaaagatgaggccaatattatagctgttttttcactcaccccaaagcccaagtttatgtggaaaaagcatgattccgatggatttaacaacgatctgtctgaaatcccaatttcatataattttactggcttctaaatacaaaatagacacaaccaaacaagcataacatagcccaaacatagtctagcttgaacggctgcttaaatagcaacaccataaatggaacaaatacaataagcgtgacaacttcttgggtaattttcatttcacccaaagtccaaccttggtcactcaagagtcgagttgccggaatcataaaactatattcgagcagggcaatagcccaaccgaataaaatcgcttgccagaatggtgcgtggtgcaaaaacttaagatgcccataccatgcaagtgtcataaaacagttagaaataattaacagaacgaaagctaaaaccgttgggctcaaaggcacatccttcatcatctcgatgatgtaagtattaatatggatcgaaaatattataaaagataaaactgtaattcagcttaaatctaaaaaataaagctgtacttttatgaacgcctcaaacacatagaacaacaacgaattttgactatcttttccagttgagccttgctatcgttgctggcaaatttatcaataatgaaaacacagtaattcacattaatactgtgtacaaaagcagtggagaaggcgagcaatgcatctgcatatcttgggtatttgtggcacttttatgggctctttagcacttttagctcgtgatttaggacataaggtaacaggttccgattcaaacgtttacccgccaatgtctacccagttagaaaatgcaggtattgaactcatgcaaggctatgaccgtagccatttacagcctcatccggacttggttattgtcggcaatgccatgaaacgtggtatagatgctgtcgaatacatgctaaatgaaggtctgccatatatttctggtccacagttccttgctgatcacgttttacaaggtaaacatgtgcttggtgtggcaggtactcacgggaaaacaactacgacaaccatgctcgcttgggtacttgatcaggcgggtttaaacccgggctttttgattggcggtgttccacttggttttagtgaaagcgctcgtttaggcggtggcaaatactttgtggttgaagccgacgaatatgactcagctttcttcgataaacgttctaagtttgttcattatcatccaaaaacggcgattttaaataaccttgaatttgaccatgccgatatttttgatgacctagcagcgattcaaaagcaattccatcatctggttcgtactattccaagtgaaggccgtattattgcgccaattaccgaaactcatattgatgaagtacttgaaatgggctgctggacaccagtgattcgtacaagtttagaagcaaatgaaaaagcggctttgtctgctgaattaatttcaattgatggcagccattttaaagtactcgaaaatggcaatgttgttggcgaagtgaaatggagcatgacagggcagcatagcgtagcgaatgcattggcaacgattgcagccgctcagcatgtaggcgtttcgcttgaaaaggcatgtgaagctttgtctaactttggcggtgtaaaacgccgtatggagttactcggcacgatcaatggtattgaggtttatgatgacttcgctcaccatccaacagcaatcgacacgactttagatggcgcacgtaaacgtttaggcgaacgtcgtttatgggccattattgagccacgttcaaataccatgcgcatgggtagccataaagatggcttagcacattctgctcgtttagcagacgaagtgatttggtatcagccagaaggcctagattgggatttacaacctgtgattgaagctgcgactaaccatgcccaagtcagccgttcacttgatgaaattattgaacgtattgtcaatgaagcaggtgagggtgatgccgttgtaattatgtctaatggtggttttggtggcttacatcaaaaacttatgagcgcattaaaagcaaaagctgcttaacttgcgctctagatgactcaataaaaaacgggtttcaaattgaaacccgtttttttagcttaattatttttaaacctgttttggctctatattttccataaatttattcgagatgaataaacgtaacgtatagacaatacccatcgcaaacacgctatatcccacgttattacaaataaacggaatacataaaataatgagtgcagtaataggataaaaccatttagtaattccagataagcattgaaactcgtaaagtatccatatgcagctggtataaagcaccacactcaccgcgacaattacacccatgtataaatcagaaatatgggcatggtgggtggtgacatccacagcagcagcaagggcagcacctacggcagcaatactcacaaaaacaaaataatggccatatccccaaacaaacggacgtacacctttaacatgatgatgctgttcactacggtcaaagtaagcccaccacattgcaaacatcaacattaatccgccaatcattaaaaaaacagccggaatattaatagattgagccgcaagcgcatcacgaatggcattaaagctacctacgatggattcccctaaaacgataatagtaagaagggcatagcgctctacaatatgatgaggatgccacggcgtaggagaatatttttctgcatagataggaacaaataactcgaccacaaccagaagtaaaaataaaggaattgaaagagcatgagcaaagttagcaacaagccaaccaatttgtaccaatacgatacctatggcataacgatacgctgtaattcgccgttcagggtcatgttttgcggctctcagccactgggtaactaaagccaaacgcataatcacatagccgacaataatgatgtcaaaatcctggctatggaacacatcaggaatacctgcggccatgaccaatgaccctacaatctgtacaaaggtaagacaccgatacaaagcatcatcgttatcgtaagccgaagcaaaccatgaaaaattcatccatgcccaccacagcgcaaaaaataccatcagataacttggtaatgcatgccatatatgattttcaataattgcatgatgtagctgctgaccagctgttgcaatcgcgaccacaaaaattaaatcgaataataattcaaggggagttgctgctctatgcggctgttctggatctcttggagataggggcctcaaacttaattttttctgtttttcttgagtagtcataaaataacgttctcgaataaattgccaacacgttaacactttaatattaacgccccgaacacgcattaaaaattatctagccttactgtctattatttactcacaaataaactatatttcatttttgtgacaattctttatcaagaccttaagcttaattctttatcatagctcacgtttttgttcttgtttggaatatgaatgtctttagaaacactcaaccttagcttattccatgtcattaatggggctcaggatgcgagtcaatttatcattcgtcttgctatcttttttgctaatgatctcctctatattcttttattcatacttacatttttatggttttatggcgatcaagatttaaaaaatagggtcattaaatctgtctttctaacctgtgtatcgcttttagtcggttacgttatttctctgttttaccatcacccaagaccgtttgtgatgggtgtgggcaccacctttattgaacatgcgccaacagcgtcttttccaagtaatcatatgctaatttttagcaccattgccctgtcttatttatttgcccagcgcaaaatgattggaattattcttttatttttgtcatttgtggtggcgtggtcacgtatttatttaggtgtgcatttccctttagacatgttaggggcttttattgtcgcactactagtcaatacagcaggttattacttctggaatgcttacggtacaagtttgacggcattctgtattcatctttatcaaattatatgcaaaccacttttagaccgcggtttgattaaataacctctagagctttttttgtagtaaaaccaccacatgaagttcagttgcgtaatacaaaaaaatctgccattctatatggacattggatatgttttatccaaaacagaatttagtttgacaaggggagtagcctcctccaaacataacagcaatgttatgtgtcagatatcgtcaatacacttttattaaaaagtcggtatctgagcatcgtgaaattcatggtgtaggcaagaccttgatcatgttgatacagatgtttaattcatctggcaactggtcgaggtttttttatgcccaattgccggatgtatggaggatttatggaaacaatcggcaatttatggctgtacgtagcattctttggcatagtcattgtcatgcttctgattgactttttaggctttaagcaaaagcaaggtcaagatgtctcaattaagcaagctgcttactggagcgtggcgtgggtaagcgttgcagccttatttggtggtggtttatggctttacctacaacaaacagttggggtgaccttagcaaaccaaaaaaccatggaatactttgcaggttacttactcgaaaagtccctcgcaattgacaacgttttcgtctggttaatgattttcgcagcgtttgctataccggctgcgctacaacgtaaaattttgctctacggcgtattaggcgcaatcgtattgcgtaccctctttatttttattggtgcatggttcgttcaagagttttcttgggtactttatatcttcggcgcgttcttggtatatacaggctttaagttcttaaaaggccaagaagaagaaaccaacattgaagatatcaagcttttaaaatggttacgtaaccatatgcgtattacaccgcagcttgaaggtgacaaattttttgtacgccaaaacggtttattatgggcaacgccgttatttctagttttgattttggttgaagcttcagacgtgattttcgccgtagattctattcctgctattttcgcggtaactagcgacccgtttattgttttaacggcgaacttaatggcaattttaggtttacgcgcaatgttctttttgcttgctggcgctgcgactaaattgcattacttaccatacggcttaggcatcatcttattgttcattggtgcgaaaatgttgttgcttgatgtattccacatgccaatctggatctcgttaagctttatcgtcatagtgttagcaatcactgcttacctttctttacgacacaacaaaaagcaattgcagtcctaattcatcacaacaaggcatctacatgtaagatgccttgttatctaaatcttcaaaagagactgtactttaaaaaaacaggttaatattatatgccaacctaaaatttatctttcctaatcagaaacataatagataacagctaatcggtattttatgccgaatatatttattaaaatgtgtggagtctcatgcgttctaaaaaaattaatcttgtcgttgtcccgttattactcacggcatgtagccataatgatggtcctttagtacaagacatatataacaaccaatatgactgtgctcgcgactggaataatgaaacatgtaaacaagaaaatagctcaagtggacatggttctagctatgttggaagccgctatttagggcctgcgtattatcaaaataatcgggaagtttcttatcacggaaataccttacatccttacagcaatttgagtgtaggccgaccagttatctcaagtacggcgaaaagcgcgtcttcttcatccccaatacgtggggggtttggtcgtagtggtttctctttcggcggctaagtctttaggcattcacttaatatgaaaagaaaaatatttactccacgaccagactggcaagtggagcatcaaaatattggttttgattattttaatttaccttctctcgatggctcaatttactggtctgaaggggttgcgtatgagtttactcttaaacagattgaacaactcgaagatgcggcaaatgaactgcatcagatgtgtttatcggtagtaggagacctcattcaacgaggaaactatcctgcttactttcaaattccagaaacagccataaaccatattgaacattcatggaaacaaaatgctccgatgctgtatggccgctttgatttcgcttacgatgggcgaaatatcaaaatgctggaatataacgccgacacaccgactggcttacttgaagcttctgtcgcacagtggctgtggatagaacaagtctcgggcattgcaaaccgagaccagttcaatagtattcatgaagacctgattaaacgctggaagacaattttaccgcgtggtagccatgtgcattttgctgcctgtcaggaagctggaagggaagactggggcaatctcgagtatttgatggataccgcttaccaagctcatctacaagtttccgagctttctatggagaacataggttggaacgggcaagattttgttgatctccataatcagcccattcaaaacatatttaaactctatccatgggaatggatctgggaagaagcattttctcaatatatccatccacaaacacagtggattgaaccttgctggaaaatgctactttcaaataaagcgattctggttgagctttggaagtgttatcccaatcatccattattggtcgaaacccatacctatgactcgcaacaaagtttgtctggcaaatgggtgaaaaagccgattttggcaagggaaggggccaatattcgggttttacaagacggccatgaccaaggcgcggcttctggtagcttttattttgatgactatgacaaatatggttatgtcgtacagaaatgggtagacaccccattattttcaggacaactacctactcttggtttatggatggttggacatcaatgtgcaggcatgtctattcgtgaagattgttatgacatcattggtaatgatgcccactttgcagcacattattttgtcgagtaataagcgaatagagatttaaaaaagcactgtttaggtgtttttttattgtgccttcgacgcagtcaatcagtgcattttaaatatatagcgaataatcaatgttggcttttaaagctaaattagaacaaaaattcaaaaatataatgatttaactccatgtattttaaaatttttattctggcttactttcttaaaattcaatattggcaagctctttgcatctccaaaaaagaaaaaagcctagattttaggggctcgtcagagccctaattttttttaaggagtaatgcaatgaatgctattccaactttaactccccttgccatgccgtgtaacagcagttttgaagcaaaagattgggaaattttatcgagccattggtatcccgtcgcacgtattcaagatgtcttcaatgcgcctcaacgagtcacactactagacgtcaatatggccctctataaaacaaaaagtggtgaaattcatctagtccgagacatttgtccacatcgtggcgtgcctttaaccaaaggttgggtggatggtgaggagattgtttgtccttatcacggtctacgctataacaccgaagggaaatgtacccaaataccagctcagcccgaactgactaaaatttctgatcgtttttctctaatcaaatttccggttgtgcaaagatacggcctcatttggaccagtattcatggtcgtgatattgataaagccaatattcctgtattagatacttgggatgatgcagaacatcaagcgattttgccaccttttgtagatattggtggttctagtggtcgtcagcttgaagggtttatcgatgtcgctcattttgcatgggtgcatcacaacgcctttgcgaatcgtgataaccctgtcgtccctaaatatcacactgaacgtaccaactatggcttaaaaacggtctatatcagcaatgtcagtaattatccgcatgaactaaaacatctcgaaccagaaggctttttgtggaagcgtacttttgaggtttatccgccattttctgccgtgcttactgtcgattttccagaaagtgggatcttaaaaattttaaatgcctgttgtcctatctcaagtaataaaacccgtttatttgttccactcacacgtaactttgaccaaacaggtgatttagaaaaagtatatgcatttaatgcgcaaatttttgccgaagaccaagacatggtcgaatcacaaaaaccagaagaactaccgctcgatctaatgatggaagcacattttgaagcagaccgttcatcaacgacttatcgacggattttggctgaatggggactaagtaaacgttataccgtttaaatcttggctaactggggtacaatcaatcgaaaaaagtgaaaatatataggctttccatgtcattgatcgcaaataccaccgttgtgcgtggtcgttttttagatattcaacaaactgtctctgagccagctgatattccaaatcaagtacgttatttggaagatggtgtattgattagtgaacatggaaagatcaaatggtttggtgcatgggaagatgctcaacagcatctacctgctggagttgaggttcaacattatccagaacaattgattgtacccggctttattgatacccatattcactttccgcaaaccgaaatggtgggagcttacggcgaacaacttttaagctggcttaatacttatactttcccaactgaaatccagtttcaagacaaaacatatgcaagcgaaattgcccagttctttgttcaggaactcttaaaacacggtacaaccacggccctcgttttctgtacagttcatcccgtgtctgttgatgccttatttgaagccgcagagcgcgttcagatgcgtttaattgccggcaaggtacttatggaccgtaatgctccggaagcgctgtgtgacacgccagaaacggcttacagcgacactaaagcactcattgaaaaatggcatggtaagggccgtgctctgtatgcgattacgccacgatttgcgccgacttctacacctgagcaattagaaagagcagggcagttaaaacaagaatttccggatgtgtatgtccatacgcatttaagtgaaaacaaagatgaaattgcttgggtgaaatctttatttccggaacaagcgggctatttagatgtttatcaacattatggcctgactggtaagcgttctgtgtttgcgcattgcgttcacttagaagatgaagaatggcaatgtatgcatgatacgcaatcggctatcgcattttgcccaacttcaaacctgttcttaggcagtggtttatttccattgaaaaaaacttgggaaaaacaagtgaaagtaggcttagggacagatattggggctggcacatcgtttagcttactgcaaactgttaacgaggcttataaggttcagcaattacaaggtgataaactctcagcttatgaagcgctttatcatgcaaccctaggcggagcaaaagcactcgatttgcaggatcagttaggtaacttcaacgtcggtaaagaagcagactttgtggtactaaacttaaagccaacagcattacaggaacttcgccagtctaaatctaaatctgttgaagattcactgtttgcattattcactttaggtgatgaccgtaatattgaggcgacttatatttatggaaactgtgcttatcaaaaagaaacagccaaataaaaaaggcattgttaagtttttgttattatttggaatatgtgctattgcgttaaagcgtgatcgacatattccgcaaaatgataaaatttcacagccatcaaagggtgcatgaaacgtcattttgctttaaaattttaccattaactcagattttcgaggtgttgctggtcaacaccttttttattttttcttttatatcttgtaggaatctgccatgactgttgcaatgagcatcatgatttcaaccgaagaaattcaagcaaaagtcaaagagctcggcgagcaaatcaattctcactatgcaaatagtgacaaagaattggttctgattggtctacttcgtggttctgttattttcatggcagacttatgccgtacgattaccaaaccacatgaactcgactttatgacagtgtctagctatggcggcggtaccacttcaagtcgagacgttaaaatcttaaaagatcttgatggtgaaattcgtggtaaagacgtgcttgtggttgaagatattattgactcaggcaacaccttaagcaaagtcgtggaaatgttgcagactcgcgaaccaaattcgattcaattatgcacattagtgagtaaaccatctcgccgtgaaattgatttagaagttaaatttttaggttttgaagttgaagataaatttattgttggttatggcttagactacgaccagaaatatcgtcacttaccatttattggtgaaattggtctgtaaattttataaaaatggcaccgcaaggtgctatttttttatataaagcctgagctttgaacaaaaaagacacaaaaagtcgcaatctgctacagacaaaacagatcactctaccgcacgatagaatatgaagcaaaatcattaacttcatcaaaaaaacaactggagaacaaatatgtggtcacttattgttgctattgtggttggtttcttcgctggcttaatcgctcgagctttacacccaggtgatgataaagcaggttttattgttactactttaattggtattgcaggttcacttctagccacttatggcggtcgcttacttggtctttatggagaaaattcagcggcgggctttattgcttctgtcattggtgccgtcattattctctttatctataacctaattgcacgaaaaagctaagtagtaaatttaattttaaaaaagcaccgaacggtgctttttttaagtcattttataaacctaactctttccaaactgcctgaatttcttcggcagagcgcgctccgacgagtttaaatccgttagcaaaaatgagagtaggtgtgccattaaaacctaattttttccctaattccaagttacggtcaatcgggtttgtacagctcgcaaccgttggtttaacaccttgctcaattaattttttccatgaatatgattgattcggtgcacaccaaacttgtctagaaaccacaatagactgaggttttaaaggatagataaaagtgtaaatagtgacatctttaagcttgtcgagttcaggttcaagctgcttacaataagggcaatttggatcagaaaatactgctaaaacatgctgaccattacctttgactgttttaatggcatcttttaaaggcaactgtttccaatcaattgagttctgccctaaaaccagatctttagttaagttcttctggtcttttaaccgaattatagagcctacaaacatgtgctgcccatcttcaccaagataaataatttgctggtccagattagcactatatagtccaggcatttcggttttctgaatattactaattttcaaattaggatattgttttttaatattttcccgaacagtatctacattagcgaaactcaaacttgtagttaaactaaataacgccaatattcctaattttttaatcataaaaccgactcggaggcaggagagaagaacattttaatcagttccgttagtgaaaacagaactgattaccgagttataaccaaacttctactcagttacgccaatgtttcacgtggaacataaacaggttttaaggtattaatttctactgaaatatgcacaatttcatcatgaatcgataaagcatcacgaatctggtctgcatttaaagagatatcatcagtttcaagtgccaaaatacaagaaaatttaccttttgcgactttccagacatgaatatctgtaatttccacatgtttcggaaattcagctattacttcccgaatttcatcaactacaggatggtccatttcagcatctagaagagtttttcctgtctctttcattaagccaaaagaccactttgcaactaaaatagcacctaaaattcctaaaagtgcatctaaaaaatcccatccaaaatatttacctgcgaaaagcgctacaattgcaaaaacagaagtcactgcatctgcaaccacatgtaaaaacgcagctttttggtttaaatcatggtgatgatgcccatggctatgctcatgatggtgatggtgatggtgatggtgatggtgatggtgatggtgatggtgatggtgatggtgaccatcatcatgaagtaaccatgcgcaaatcaagttaataactaaacctaaaattgcaattggaatcgcctcattataaaaaatttcaactgggttaaataaacgttgaattgactgaaacgccataaaaatagccacaaccatcagcaaaattgcgctgctatagccagctaaaatctcaattttccaagttccaaagctaaaacggtgatcattggaataatggcgggctgcacgataggcaaagtaggctaaaccaagggccaacatatgtgaactcatatgccaaccgtcggccagtagtgccattgaattgaagaaccatccaccaaatacttccagtaccatcatggacgccgttaaaatggttgcaatcaaaatacgtttttgtgcaagtggatttccttcatcaaactgatgttgatgatgacgtgatacactataatcctgcataaaatttaaacccaatatactccctaccagtatattaaattgtacaagagaaaacagatgagtcacattggtcaggataaaaaaattgttaatcgtgtaaaacgactaaaagggcaaatcaacagcattgaaaatgcgatagaacaaccagaatcttcatgtatagatattttgcagcaagttgcagccataaaaggtgcaataaacggtttgatgagtgaattaatggaacagcacttacatcatcacgtacttaaaggcgcagaagtcgatcaaaatgagctagatgaatttttaaaagttttaaagagatacggctgagaaaagtactggatgacatagcactctacatcatccagttttttattattttccgatacagaacgaaccaaagattttgcctaataggtcatcggcactaaagtcacccgtaatttcacctaaagcattttgagcaagacgtagtgattcagcaacgagttcacctgcgttaaatacaacaagttgctcacgtgcctctgccaaatagagctgagtgcgcttcattgcgtctaaatgacgtgttctcgcaataaatgtatcttcctcagggtgaaatcctgcatgcgctgtaatcgcatctacgaggccttgtacgcccatctcttgttttgctgaaactgtgatatgacggaacccttgataatcgcttatttcggcagattgaccagttaaatcacatttattgccaattaacatgagacgacgcggttcaatatgttcagcaaagtattcttgagccagttttaaggggtcatcgccttgatttaaatcgtagaccaataacaacaaatcggcctgctcaatttctttgattgcacgacgaatgccttctttctcgactacatctcccgtttcacgaagacccgcagtatccgttaaggtgattggtaaaccatttaagctaattttttcatgtaaaacatcacgagttgtaccagcaatatcagtcacaattgcacgctcaacaccagcaagtgcatttaacaagctcgacttacccgcgtttggtttacccgcaataacaacctgtagaccttcacggagtaattgcccttgtcgtgcagaggtttgaacggcatgtacagattgttgaacatcttccaacaaagctaaaattttgccatcagccaaaaaatcaatttcttcttctggaaaatcaatcgcagcttctacgtgcagacgtaaatgaatcagtttttctaaaactgtattaatttttgttgaaaaagcgccttgtaaagaacggactgccgaacgagccgcagcttgagaggtcgcatcaatcaaatcggcaattgcttcagcttgtaccaagtccattttgccattttcaaaagctcgcatggagaattccccagcttttgcagcaattgccccaagctcaaataaacggccaagtaaggcattttgaatgacaggaccaccgtggccttgaagttctacaacatcttcaccggtaaaagaatgtggatttggaaagcacaagacaatgccttcatccataatacttccatcagcatcataaaacttacggaaacccgccaaccgagcttcaggtaagtttttttgcgtcagtttttgagcaatatcataagccttaggtcccgataagcgaatcacgcccactccaccacgccctggtggcgttgcaattgcggcaattgtggtttgactatgcatattattcacctaaaaacctaaaatacagtcaaagaaaaatccgcctaagattaccatcttaagcggattgattcagcaaaagttcaaggattaagatgccgattcagctttactgatacgacttttctcaacactcttgttaataaaccattgctgtaagattgtaatactgttgttcacaatccagtacaacacaagacccgcagggaagaacaacataaataccgtaaacataatcggcataatgcggaatactttcgcctgcattggatcagctggttgcgggttcaacatttgctgagcaaacattgtcgcacccataattaatggcaagatgaaccatgggtccatcgcagacaaatcgtgaatccagcctaaccacggtgcatgacgtaattccacactttccatgagtacccagtacaaagcaaggaaaattggcatttgtagcaataacggtaaacaaccagaaagcgggttaacctgttcacgtttgtaaagcgccatcatttcttgcgagaagcgcatacggtcttcaccgaattcttctttcatgcgttgcatttctggtgcaatcacacgcattttcgccatagaacgataactttttgaagataaaggccataaaatcatcttcaccataatggtaagtaagataattgaccatccccagttgcctacaatgctatggaagaattgaagacctaggaacaataacttcgcaattggccataaccaaccatagtcaacagtctggtttaaacctaccgctaaatcttttaattcagattgtacttttggacctgaataaagcttcgcatcgacttccattgaagtacccgccggaacattaattactggcgaagtaaagccaataatattcatatgatccgcagactgacgagattcaagtttagcgacataaggctgaccatttgcttgagtcagtttaaggtttcctggaatccaagcacttacaaagtaatgctgaaccattgcaacccaaccgcctttagcttcggtattgagtttttcttcagagaaattcgcaaacttaagtttgttgtagtgagcatccggagtaccccatgcaccacctaagaacgtacctaaagtgaaaataccctgagaagacttacctggatcttccgaattatcacgtttcaactgtccaaacatctgaccttgccagttttgttggctacggttaacaacttgatgtttgacaacaattggatattgaccttgagtaaatgtaaaagttttaataatttcaacgccttctggtgtcttaaacaccataggaactgttaaaactttctcagaatgtccactttgatcttgtacccctttagcatcagctaaagtatatgatgttttttcaacagcatataatgggcgaccaccacgactgctatctggtccattcaaaccaattaagccagactgagcaacataagtacgcttggcatcattttcaagcataacaaatggttgattactgtctttgctcttgtcgtgagagagtaattcaatacgaacaatatcaccaccttttggattgatccaaagatgataaaggtcagtttgtactgaaataagctgttgattcacaggtgcagttgcatctgtggtttgtgactgcgcaatatttgcttgtggcacatcggaagccactgttgcagttttagcatttggcaaatcagcagatacttcatgtgaacttacagccgccgcttgttgttgcggtgcagttgcagcatttccataatctttttgccaagccaaaatgagcaaatatgcggtgacaaacatggccccgagaattgcaaacctggcccattgttgcatatctattaccccaaatggttagagagattttgcttcattaaacgatcacgaaagggtacagcaacatgatgcgtttgagaatctatttgatgaaacgaaataaaacgaattgctttaggcggtaccggatcgtatccagagcctccccacggatgacaacgacaaatacgtttagaagataaccaaacgcctttgattgcaccatgagtttgtaatgcttctagcgcatattgggaacaagttgggatataacgacaacggggtccaagaagcggactaatcgcaatttgatacagtcgaatgaaccaacgcaaaatacgaaccattggtcatctcttaattctgcgaggttgggacaactttagaatgttttttcgctaagcgttgtaatttttgccaagcaaaatctaattgttgatatagctcagcattcgtaatcgtttctataccaactttaggcatcacaacaacatctatgtctgactcaaatttcggctgatgtagacgaaagctctcacgagcaagacgttttattcgatttctttcatgcgcacgacgcacttttttcttagcaacaacaatacccaaacggctgttaggctgttcggttaattttgcaagaaataaaaaatggggttgatgcactttaaaaagcgcaccatcaaatacacttttataatctgcagcacagcgtatacgaagatctgtgctaaaactgtaaagtgccatcacacccaagtctggtcagcgtaacagtattaaacagttaagctatgacgaccttttgcacgacgacgagctaatacttgacgaccagctttagttgccatacgagcacggaaaccatgaacgcgtttacgctttaattcagatggttggaaagtacgtttcatatcgaaactcccaaaaatgatctttctataaaggtccgcgattttattgtgcaatgtttacgctgtcaatgaaaaaccgtgaaagttttgtatttaagtcaaatttttaactttttatcttctctttatatttagcctattttcttatttaaaag
